(19) United States
(12) Patent Application Publication
(10) Pub. No.: US 2002/0076414 A1
(43) Pub. Date: Jun. 20, 2002

(54) Compounds for immunotherapy and diagnosis of colon cancer and methods for their use

(75) Inventors: Jiangchun Xu, Bellevue, WA (US); Michael J. Lodes, Seattle, WA (US); Heather Secrist, Seattle, WA (US); Darin R. Benson, Seattle, WA (US); Madeleine Joy Meagher, Seattle, WA (US); John A. Stolk, Bothell, WA (US); Tongtong Wang, Medina, WA (US); Yuqiu Jiang, Kent, WA (US); Carole L. Smith, Seattle, WA (US); Gordon E. King, Shoreline, WA (US); Aijun Wang, Issaquah, WA (US); Jonathan D. Clapper, Seattle, WA (US)

Correspondence Address: SEED INTELLECTUAL PROPERTY LAW GROUP PLLC, 701 FIFTH AVE, SUITE 6300, SEATTLE, WA, 98104-7092, US

(73) Assignee: Corixa Corporation, Seattle, WA (US)

(21) Appl. No.: 09/922,217

(22) Filed: Aug. 3, 2001

Related U.S. Application Data
(63) Continuation-in-part of application No. 09/833,263, filed on Apr. 10, 2001.
Application No. 09/833,263 is a continuation-in-part of application No. 09/649,811, filed on Aug. 28, 2000.
Application No. 09/649,811 is a continuation-in-part of application No. 09/609,448, filed on Jun. 29, 2000.
Application No. 09/609,448 is a continuation-in-part of application No. 09/575,251, filed on May 19, 2000.
Application No. 09/575,251 is a continuation-in-part of application No. 09/519,444, filed on Mar. 6, 2000.
Application No. 09/519,444 is a continuation-in-part of application No. 09/504,629, filed on Feb. 15, 2000.
Application No. 09/504,629 is a continuation-in-part of application No. 09/480,321, filed on Jan. 10, 2000, now abandoned.
Application No. 09/480,321 is a continuation-in-part of application No. 09/476,296, filed on Dec. 30, 1999.
Application No. 09/476,296 is a continuation-in-part of application No. 09/454,150, filed on Dec. 2, 1999, now abandoned.
Application No. 09/454,150 is a continuation-in-part of application No. 09/444,252, filed on Apr. 10, 2000.
Application No. 09/444,252 is a continuation-in-part of application No. 09/401,064, filed on Sep. 22, 1999.
Application No. 09/401,064 is a continuation-in-part of application No. 09/347,496, filed on Jul. 2, 1999.
Application No. 09/347,496 is a continuation-in-part of application No. 09/221,298, filed on Dec. 23, 1998.

(30) Foreign Application Priority Data
Dec. 23, 1999 (WO) PCT/US99/30909

(51) Int. Cl. A61K 39/00; C12Q 1/68; G01N 33/574; C07H 21/04; C12N 9/00; C12N 5/06; C12P 21/02

(52) U.S. Cl. 424/185.1; 435/6; 435/7.23; 435/69.1; 435/183; 435/325; 435/320.1; 536/23.1

(57) ABSTRACT

Compositions and methods for the therapy and diagnosis of cancer, such as colon cancer, are disclosed. Compositions may comprise one or more colon tumor proteins, immunogenic portions thereof, or polynucleotides that encode such portions. Alternatively, a therapeutic composition may comprise an antigen presenting cell that expresses a colon tumor protein, or a T cell that is specific for cells expressing such a protein. Such compositions may be used, for example, for the prevention and treatment of diseases such as colon cancer. Diagnostic methods based on detecting a colon tumor protein, or mRNA encoding such a protein, in a sample are also provided.

### CROSS-REFERENCE TO RELATED APPLICATIONS

[0001] This application is a continuation-in-part of U.S. patent application Ser. No. 09/833,263 filed Apr. 10, 2001, which is a continuation-in-part of U.S. patent application Ser. No. 09/649,811 filed Aug. 28, 2000, which is a continuation-in-part of U.S. patent application Ser. No. 09/609,448, filed Jun. 29, 2000, which is a continuation-in-part of U.S. patent application Ser. No. 09/575,251 filed May 19, 2000, which is a continuation-in-part of U.S. patent application Ser. No. 09/519,444, filed Mar. 6, 2000 which is a continuation-in-part of U.S. patent application Ser. No. 09/504,629, filed Feb. 15, 2000, which is a continuation-in-part of U.S. patent application Ser. No. 09/480,321, filed Jan. 10, 2000, which is a continuation-in-part of U.S. patent application Ser. No. 09/476,296, filed Dec. 30, 1999, which is a continuation-in-part of U.S. patent application Ser. No. 09/454,150, filed Dec. 2, 1999, which is a continuation-in-part of U.S. patent application Ser. No. 09/444,252, filed Nov. 19, 1999 which is a continuation-in-part of U.S. patent application Ser. No. 09/401,064, filed Sep. 22, 1999 which is a continuation-in-part of U.S. patent application Ser. No. 09/347,496, filed Jul. 2, 1999, which is a continuation-in-part of U.S. patent application Ser. No. 09/221,298, filed Dec. 23, 1998, each of which applications is co-pending. This application also claims the priority benefit of PCT/US99/30909, filed Dec. 23, 1999, published.

### BACKGROUND OF THE INVENTION

[0002] 1. Field of the Invention

[0003] The present invention relates generally to therapy and diagnosis of cancer, such as colon cancer. The invention is more specifically related to polypeptides comprising at least a portion of a colon tumor protein, and to polynucleotides encoding such polypeptides. Such polypeptides and polynucleotides may be used in vaccines and pharmaceutical compositions for prevention and treatment of colon cancer, and for the diagnosis and monitoring of such cancers.

[0004] 2. Description of the Related Art

[0005] Cancer is a significant health problem throughout the world. Although advances have been made in detection and therapy of cancer, no vaccine or other universally successful method for prevention or treatment is currently available. Current therapies, which are generally based on a combination of chemotherapy or surgery and radiation, continue to prove inadequate in many patients.

[0006] Colon cancer is the second most frequently diagnosed malignancy in the United States as well as the second most common cause of cancer death. The five-year survival rate for patients with colorectal cancer detected in an early localized stage is 92%; unfortunately, only 37% of colorectal cancer is diagnosed at this stage. The survival rate drops to 64% if the cancer is allowed to spread to adjacent organs or lymph nodes, and to 7% in patients with distant metastases.

[0007] The prognosis of colon cancer is directly related to the degree of penetration of the tumor through the bowel wall and the presence or absence of nodal involvement, consequently, early detection and treatment are especially important. Currently, diagnosis is aided by the use of screening assays for fecal occult blood, sigmoidoscopy, colonoscopy and double contrast barium enemas. Treatment regimens are determined by the type and stage of the cancer, and include surgery, radiation therapy and/or chemotherapy. Recurrence following surgery (the most common form of therapy) is a major problem and is often the ultimate cause of death. In spite of considerable research into therapies for the disease, colon cancer remains difficult to diagnose and treat. In spite of considerable research into therapies for these and other cancers, colon cancer remains difficult to diagnose and treat effectively. Accordingly, there is a need in the art for improved methods for detecting and treating such cancers. The present invention fulfills these needs and further provides other related advantages.

### BRIEF SUMMARY OF THE INVENTION

[0008] In one aspect, the present invention provides polynucleotide compositions comprising a sequence selected from the group consisting of:

[0009] (a) sequences provided in SEQ ID NOs: 1-121, 123-197, 205-630, 632-684, 686, 690-691, 694-1058, 1069, 1071-1076, 1082, 1084, 1086, 1092, 1094, 1096-1101, 1103-1106, 1111-1114, 1119, and 1120,

[0010] (b) complements of the sequences provided in SEQ ID NOs: 1-121, 123-197, 205-630, 632-684, 686, 690-691, 694-1058, 1069, 1071-1076, 1082, 1084, 1086, 1092, 1094, 1096-1101, 1103-1106, 1111-1114, 1119, and 1120;

[0011] (c) sequences consisting of at least 20 contiguous residues of a sequence provided in SEQ ID NOs: 1-121, 123-197, 205-630, 632-684, 686, 690-691, 694-1058, 1069, 1071-1076, 1082, 1084, 1086, 1092, 1094, 1096-1101, 1103-1106, 1111-1114, 1119, and 1120;

[0012] (d) sequences that hybridize to a sequence provided in SEQ ID NOs: 1-121, 123-197, 205-630, 632-684, 686, 690-691, 694-1058, 1069, 1071-1076, 1082, 1084, 1086, 1092, 1094, 1096-1101, 1103-1106, 1111-1114, 1119, and 1120, under moderately stringent conditions;

[0013] (e) sequences having at least 75% identity to a sequence of SEQ ID NOs: 1-121, 123-197, 205-630, 632-684, 686, 690-691, 694-1058, 1069, 1071-1076, 1082, 1084, 1086, 1092, 1094, 1096-1101, 1103-1106, 1111-1114, 1119, and 1120;

[0014] (f) sequences having at least 90% identity to a sequence of SEQ ID NOs: 1-121, 123-197, 205-630, 632-684, 686, 690-691, 694-1058, 1069, 1071-1076, 1082, 1084, 1086, 1092, 1094, 1096-1101, 1103-1106, 1111-1114, 1119, and 1120, and

[0015] (g) degenerate variants of a sequence provided in SEQ ID NOs: 1-121, 123-197, 205-630, 632-684, 686, 690-691, 694-1058, 1069, 1071-1076, 1082, 1084, 1086, 1092, 1094, 1096-1101, 1103-1106, 1111-1114, 1119, and 1120,

[0016] In one preferred embodiment, the polynucleotide compositions of the invention are expressed in at least about 20%, more preferably in at least about 30%, and most preferably in at least about 50% of colon tumors samples tested, at a level that is at least about 2-fold, preferably at least about 5-fold, and most preferably at least about 10-fold higher than that for normal tissues.

[0017] The present invention, in another aspect, provides polypeptide compositions comprising an amino acid sequence that is encoded by a polynucleotide sequence described above.

[0018] The present invention further provides polypeptide compositions comprising an amino acid sequence selected from the group consisting of sequences recited in SEQ ID NOs: 122, 198-204, 631, 685, 687, 692, 693, 1059-1068, 1070, 1077-1081, 1083, 1085, 1087, 1093, 1095, 1102, 1107-1110, 1115-1118, 1121, and 1122.

[0019] In certain preferred embodiments, the polypeptides and/or polynucleotides of the present invention are immunogenic, i.e., they are capable of eliciting an immune response, particularly a humoral and/or cellular immune response, as further described herein.

[0020] The present invention further provides fragments, variants and/or derivatives of the disclosed polypeptide and/or polynucleotide sequences, wherein the fragments, variants and/or derivatives preferably have a level of immunogenic activity of at least about 50%, preferably at least about 70% and more preferably at least about 90% of the level of immunogenic activity of a polypeptide sequence set forth in SEQ ID NOs: 122, 198-204, 631, 685, 687, 692, 693, 1059-1068, 1070, 1077-1081, 1083, 1085, 1087, 1093, 1095, 1102, 1107-1110, 1115-1118, 1121, and 1122 or a polypeptide sequence encoded by a polynucleotide sequence set forth in SEQ ID NOs: 1-121, 123-197, 205-630, 632-684, 686, 690-691, 694-1058, 1069, 1071-1076, 1082, 1084, 1086, 1092, 1094, 1096-1101, 1103-1106, 1111-1114, 1119, and 1120,.

[0021] The present invention further provides polynucleotides that encode a polypeptide described above, expression vectors comprising such polynucleotides and host cells transformed or transfected with such expression vectors.

[0022] Within other aspects, the present invention provides pharmaceutical compositions comprising a polypeptide or polynucleotide as described above and a physiologically acceptable carrier.

[0023] Within a related aspect of the present invention, the pharmaceutical compositions, e.g., vaccine compositions, are provided for prophylactic or therapeutic applications. Such compositions generally comprise an immunogenic polypeptide or polynucleotide of the invention and an immunostimulant, such as an adjuvant.

[0024] The present invention further provides pharmaceutical compositions that comprise: (a) an antibody or antigen-binding fragment thereof that specifically binds to a polypeptide of the present invention, or a fragment thereof; and (b) a physiologically acceptable carrier.

[0025] Within further aspects, the present invention provides pharmaceutical compositions comprising: (a) an antigen presenting cell that expresses a polypeptide as described above and (b) a pharmaceutically acceptable carrier or excipient. Illustrative antigen presenting cells include dendritic cells, macrophages, monocytes, fibroblasts and B cells.

[0026] Within related aspects, pharmaceutical compositions are provided that comprise: (a) an antigen presenting cell that expresses a polypeptide as described above and (b) an immunostimulant.

[0027] The present invention further provides, in other aspects, fusion proteins that comprise at least one polypeptide as described above, as well as polynucleotides encoding such fusion proteins, typically in the form of pharmaceutical compositions, e.g., vaccine compositions, comprising a physiologically acceptable carrier and/or an immunostimulant. The fusions proteins may comprise multiple immunogenic polypeptides or portions/variants thereof, as described herein, and may further comprise one or more polypeptide segments for facilitating the expression, purification and/or immunogenicity of the polypeptide(s).

[0028] Within further aspects, the present invention provides methods for stimulating an immune response in a patient, preferably a T cell response in a human patient, comprising administering a pharmaceutical composition described herein. The patient may be afflicted with colon cancer, in which case the methods provide treatment for the disease, or patient considered at risk for such a disease may be treated prophylactically.

[0029] Within further aspects, the present invention provides methods for inhibiting the development of a cancer in a patient, comprising administering to a patient a pharmaceutical composition as recited above. The patient may be afflicted with colon cancer, in which case the methods provide treatment for the disease, or patient considered at risk for such a disease may be treated prophylactically.

[0030] The present invention further provides, within other aspects, methods for removing tumor cells from a biological sample, comprising contacting a biological sample with T cells that specifically react with a polypeptide of the present invention, wherein the step of contacting is performed under conditions and for a time sufficient to permit the removal of cells expressing the protein from the sample.

[0031] Within related aspects, methods are provided for inhibiting the development of a cancer in a patient, comprising administering to a patient a biological sample treated as described above.

[0032] Methods are further provided, within other aspects, for stimulating and/or expanding T cells specific for a polypeptide of the present invention, comprising contacting T cells with one or more of: (i) a polypeptide as described above; (ii) a polynucleotide encoding such a polypeptide; and/or (iii) an antigen presenting cell that expresses such a polypeptide; under conditions and for a time sufficient to permit the stimulation and/or expansion of T cells. Isolated T cell populations comprising T cells prepared as described above are also provided.

[0033] Within further aspects, the present invention provides methods for inhibiting the development of a cancer in a patient, comprising administering to a patient an effective amount of a T cell population as described above.

[0034] The present invention further provides methods for inhibiting the development of a cancer in a patient, comprising the steps of: (a) incubating CD4⁺ and/or CD8⁺ T cells isolated from a patient with one or more of: (i) a polypeptide comprising at least an immunogenic portion of polypeptide disclosed herein; (ii) a polynucleotide encoding such a polypeptide; and (iii) an antigen-presenting cell that expressed such a polypeptide; and (b) administering to the patient an effective amount of the proliferated T cells, and thereby inhibiting the development of a cancer in the patient. Proliferated cells may, but need not, be cloned prior to administration to the patient.

[0035] Within further aspects, the present invention provides methods for determining the presence or absence of a cancer, preferably a colon cancer, in a patient comprising: (a) contacting a biological sample obtained from a patient with a binding agent that binds to a polypeptide as recited above; (b) detecting in the sample an amount of polypeptide that binds to the binding agent; and (c) comparing the amount of polypeptide with a predetermined cut-off value, and therefrom determining the presence or absence of a cancer in the patient. Within preferred embodiments, the binding agent is an antibody, more preferably a monoclonal antibody.

[0036] The present invention also provides, within other aspects, methods for monitoring the progression of a cancer in a patient. Such methods comprise the steps of: (a) contacting a biological sample obtained from a patient at a first point in time with a binding agent that binds to a polypeptide as recited above; (b) detecting in the sample an amount of polypeptide that binds to the binding agent; (c) repeating steps (a) and (b) using a biological sample obtained from the patient at a subsequent point in time; and (d) comparing the amount of polypeptide detected in step (c) with the amount detected in step (b) and therefrom monitoring the progression of the cancer in the patient.

[0037] The present invention further provides, within other aspects, methods for determining the presence or absence of a cancer in a patient, comprising the steps of: (a) contacting a biological sample obtained from a patient with an oligonucleotide that hybridizes to a polynucleotide that encodes a polypeptide of the present invention; (b) detecting in the sample a level of a polynucleotide, preferably mRNA, that hybridizes to the oligonucleotide; and (c) comparing the level of polynucleotide that hybridizes to the oligonucleotide with a predetermined cut-off value, and therefrom determining the presence or absence of a cancer in the patient. Within certain embodiments, the amount of mRNA is detected via polymerase chain reaction using, for example, at least one oligonucleotide primer that hybridizes to a polynucleotide encoding a polypeptide as recited above, or a complement of such a polynucleotide. Within other embodiments, the amount of mRNA is detected using a hybridization technique, employing an oligonucleotide probe that hybridizes to a polynucleotide that encodes a polypeptide as recited above, or a complement of such a polynucleotide.

[0038] In related aspects, methods are provided for monitoring the progression of a cancer in a patient, comprising the steps of: (a) contacting a biological sample obtained from a patient with an oligonucleotide that hybridizes to a polynucleotide that encodes a polypeptide of the present invention; (b) detecting in the sample an amount of a polynucleotide that hybridizes to the oligonucleotide; (c) repeating steps (a) and (b) using a biological sample obtained from the patient at a subsequent point in time; and (d) comparing the amount of polynucleotide detected in step (c) with the amount detected in step (b) and therefrom monitoring the progression of the cancer in the patient.

[0039] Within further aspects, the present invention provides antibodies, such as monoclonal antibodies, that bind to a polypeptide as described above, as well as diagnostic kits comprising such antibodies. Diagnostic kits comprising one or more oligonucleotide probes or primers as described above are also provided.

[0040] These and other aspects of the present invention will become apparent upon reference to the following detailed description. All references disclosed herein are hereby incorporated by reference in their entirety as if each was incorporated individually.

### SEQUENCE IDENTIFIERS

[0041] SEQ ID NO: 1 is a first determined cDNA sequence for Contig 1, showing homology to Neutrophil Gelatinase Associated Lipocalin.

[0042] SEQ ID NO: 2 is the determined cDNA sequence for Contig 2, showing no significant homology to any known genes.

[0043] SEQ ID NO: 3 is the determined cDNA sequence for Contig 4, showing homology to Carcinoembryonic antigen.

[0044] SEQ ID NO: 4 is the determined cDNA sequence for Contig 5, showing homology to Carcinoembryonic antigen.

[0045] SEQ ID NO: 5 is the determined cDNA sequence for Contig 9, showing homology to Carcinoembryonic antigen.

[0046] SEQ ID NO: 6 is the determined cDNA sequence for Contig 52, showing homology to Carcinoembryonic antigen.

[0047] SEQ ID NO: 7 is the determined cDNA sequence for Contig 6, showing homology toVillin.

[0048] SEQ ID NO: 8 is the determined cDNA sequence for Contig 8, showing no significant homology to any known genes.

[0049] SEQ ID NO: 9 is the determined cDNA sequence for Contig 10, showing homology to Transforming Growth Factor (BIGH3).

[0050] SEQ ID NO: 10 is the determined cDNA sequence for Contig 19, showing homology to Transforming Growth Factor (BIGH3).

[0051] SEQ ID NO: 11 is the determined cDNA sequence for Contig 21, showing homology to Transforming Growth Factor (BIGH3).

[0052] SEQ ID NO: 12 is the determined cDNA sequence for Contig 11, showing homology to CO-029.

[0053] SEQ ID NO: 13 is the determined cDNA sequence for Contig 55, showing homology to CO-029.

[0054] SEQ ID NO: 14 is the determined cDNA sequence for Contig 12, showing homology to Chromosome 17, clone hRPC.1171_I_{—}10, also referred to as C798P.

[0055] SEQ ID NO: 15 is the determined cDNA sequence for Contig 13, showing no significant homology to any known gene.

[0056] SEQ ID NO: 16 is the determined cDNA sequence for Contig 14, also referred to as 14261, showing no significant homology to any known gene.

[0057] SEQ ID NO: 17 is the determined eDNA sequence for Contig 15, showing homology to Ets-Related Transcription Factor (ERT).

[0058] SEQ ID NO: 18 is the determined cDNA sequence for Contig 16, showing homology to Chromosome 5, PAC clone 228g9 (LBNL H142).

[0059] SEQ ID NO: 19 is the determined cDNA sequence for Contig 24, showing homology to Chromosome 5, PAC clone 228g9 (LBNL H142).

[0060] SEQ ID NO: 20 is the determined cDNA sequence for Contig 17, showing homology to Cytokeratin.

[0061] SEQ ID NO: 21 is the determined cDNA sequence for Contig 18, showing homology to L1-Cadherin.

[0062] SEQ ID NO: 22 is the determined cDNA sequence for Contig 20, showing no significant homology to any known gene.

[0063] SEQ ID NO: 23 is the determined cDNA sequence for Contig 22, showing homology to Bumetanide-sensitive Na—K—Cl cotransporter (NKCCl).

[0064] SEQ ID NO: 24 is the determined cDNA sequence for Contig 23, showing no significant homology to any known gene.

[0065] SEQ ID NO: 25 is the determined cDNA sequence for Contig 25, showing homology to Macrophage Inflammatory Protein 3 alpha.

[0066] SEQ ID NO: 26 is the determined cDNA sequence for Contig 26, showing homology to Laminin.

[0067] SEQ ID NO: 27 is the determined cDNA sequence for Contig 48, showing homology to Laminin.

[0068] SEQ ID NO: 28 is the determined cDNA sequence for Contig 27, showing homology to Mytobularin (MTM1).

[0069] SEQ ID NO: 29 is the determined cDNA sequence for Contig 28, showing homology to Chromosome 16 BAC clone CIT987SK-A-363E6.

[0070] SEQ ID NO: 30 is the determined cDNA sequence for Contig 29, also referred to as C751P and 14247, showing no significant homology to any known gene, but partial homology to Rat GSK-3-interacting protein Axil homolog.

[0071] SEQ ID NO: 31 is the determined cDNA sequence for Contig 30, showing homology to Zinc Finger Transcription Factor (ZNF207).

[0072] SEQ ID NO: 32 is the determined cDNA sequence for Contig 31, showing no significant homology to any known gene, but partial homology to Mus musculus GOB-4 homolog.

[0073] SEQ ID NO: 33 is the determined eDNA sequence for Contig 35, showing no significant homology to any known gene, but partial homology to Mus musculus GOB-4 homolog.

[0074] SEQ ID NO: 34 is the determined cDNA sequence for Contig 32, showing no significant homology to any known gene.

[0075] SEQ ID NO: 35 is the determined cDNA sequence for Contig 34, showing homology to Desmoglein 2.

[0076] SEQ ID NO: 36 is the determined cDNA sequence for Contig 36, showing no significant homology to any known gene.

[0077] SEQ ID NO: 37 is the determined cDNA sequence for Contig 37, showing homology to Putative Transmembrane Protein.

[0078] SEQ ID NO: 38 is the determined cDNA sequence for Contig 38, also referred to as C796P and 14219, showing no significant homology to any known gene.

[0079] SEQ ID NO: 39 is the determined cDNA sequence for Contig 40, showing homology to Nonspecific Cross-reacting Antigen.

[0080] SEQ ID NO: 40 is the determined cDNA sequence for Contig 41, also referred to as C799P and 14308, showing no significant homology to any known gene.

[0081] SEQ ID NO: 41 is the determined cDNA sequence for Contig 42, also referred to as C794P and 14309, showing no significant homology to any known gene.

[0082] SEQ ID NO: 42 is the determined eDNA sequence for Contig 43, showing homology to Chromosome 1 specific transcript KIAA0487.

[0083] SEQ ID NO: 43 is the determined cDNA sequence for Contig 45, showing homology to hMCM2.

[0084] SEQ ID NO: 44 is the determined cDNA sequence for Contig 46, showing homology to ETS2.

[0085] SEQ ID NO: 45 is the determined cDNA sequence for Contig 49, showing homology to Pump-1.

[0086] SEQ ID NO: 46 is the determined cDNA sequence for Contig 50, also referred to as C792P and 18323, showing no significant homology to any known gene.

[0087] SEQ ID NO: 47 is the determined cDNA sequence for Contig 51, also referred to as C795P and 14317, showing no significant homology to any known gene.

[0088] SEQ ID NO: 48 is the determined cDNA sequence for 11092, showing no significant homology to any known gene.

[0089] SEQ ID NO: 49 is the determined cDNA sequence for 11093, showing no significant homology to any known gene.

[0090] SEQ ID NO: 50 is the determined cDNA sequence for 11094, showing homology Human Putative Enterocyte Differentiation Protein.

[0091] SEQ ID NO: 51 is the determined cDNA sequence for 11095, showing homology to Human Transcriptional Corepressor hKAP1/TIF1B mRNA.

[0092] SEQ ID NO: 52 is the determined cDNA sequence for 11096, showing no significant homology to any known gene.

[0093] SEQ ID NO: 53 is the determined cDNA sequence for 11097, showing homology to Human Nonspecific Antigen.

[0094] SEQ ID NO: 54 is the determined cDNA sequence for 11098, showing no significant homology to any known gene.

[0095] SEQ ID NO: 55 is the determined cDNA sequence for 11099, showing homology to Human Pancreatic Secretory Inhibitor (PST) mRNA.

[0096] SEQ ID NO: 56 is the determined cDNA sequence for 11186, showing homology to Human Pancreatic Secretory Inhibitor (PST) mRNA.

[0097] SEQ ID NO: 57 is the determined cDNA sequence for 11101, showing homology to Human Chromosome X.

[0098] SEQ ID NO: 58 is the determined cDNA sequence for 11102, showing homology to Human Chromosome X.

[0099] SEQ ID NO: 59 is the determined cDNA sequence for 11103, showing no significant homology to any known gene.

[0100] SEQ ID NO: 60 is the determined cDNA sequence for 11174, showing no significant homology to any known gene.

[0101] SEQ ID NO: 61 is the determined cDNA sequence for 11104, showing homology to Human mRNA for KIAA0154.

[0102] SEQ ID NO: 62 is the determined cDNA sequence for 11105, showing homology toHuman Apurinic/Apyrimidinic Endonuclease (hap l)rnRNA.

[0103] SEQ ID NO: 63 is the determined cDNA sequence for 11106, showing homology toHuman Chromosome 12p13.

[0104] SEQ ID NO: 64 is the determined cDNA sequence for 11107, showing homology to Human 90 kDa Heat Shock Protein.

[0105] SEQ ID NO: 65 is the determined cDNA sequence for 11108, showing no significant homology to any known gene.

[0106] SEQ ID NO: 66 is the determined cDNA sequence for 11112, showing no significant homology to any known gene.

[0107] SEQ ID NO: 67 is the determined cDNA sequence for 11115, showing no significant homology to any known gene.

[0108] SEQ ID NO: 68 is the determined cDNA sequence for 11117, showing no significant homology to any known gene.

[0109] SEQ ID NO: 69 is the determined cDNA sequence for 11118, showing no significant homology to any known gene.

[0110] SEQ ID NO: 70 is the determined cDNA sequence for 11119, showing homology to Human Elongation Factor 1-alpha.

[0111] SEQ ID NO: 71 is the determined cDNA sequence for 11121, showing homology to Human Lamin B Receptor (LBR) mRNA.

[0112] SEQ ID NO: 72 is the determined cDNA sequence for 11122, showing homology to H. sapiens mRNA for Novel Glucocorticoid.

[0113] SEQ ID NO: 73 is the determined cDNA sequence for 11123, showing homology to H. sapiens mRNA for snRNP protein B.

[0114] SEQ ID NO: 74 is the determined cDNA sequence for 11124, showing homology to Human Cisplatin Resistance Associated Beta-protein.

[0115] SEQ ID NO: 75 is the determined cDNA sequence for 11127, showing homology to M. musculus Calumenin mRNA.

[0116] SEQ ID NO: 76 is the determined cDNA sequence for 11128, showing homology to Human ras-related small GTP binding protein.

[0117] SEQ ID NO: 77 is the determined cDNA sequence for 11130, showing homology to Human Cosmid U169d2.

[0118] SEQ ID NO: 78 is the determined cDNA sequence for 11131, showing homology to H. sapiens mRNA for protein homologous to Elongation 1-g.

[0119] SEQ ID NO: 79 is the determined cDNA sequence for 11134, showing no significant homology to any known gene.

[0120] SEQ ID NO: 80 is the determined EDNA sequence for 11135, showing homology to H. sapiens Nieman-Pick (NPC1) mRNA.

[0121] SEQ ID NO: 81 is the determined cDNA sequence for 11137, showing homology to H. sapiens mRNA for Niecin b-chain.

[0122] SEQ ID NO: 82 is the determined cDNA sequence for 11138, showing homology to Human Endogenous Retroviral Protease mRNA.

[0123] SEQ ID NO: 83 is the determined cDNA sequence for 11139, showing homology to H. sapiens mRNA for DMBT1 protein.

[0124] SEQ ID NO: 84 is the determined cDNA sequence for 11140, showing homology to H. sapiens ras GTPase activating-like protein.

[0125] SEQ ID NO: 85 is the determined cDNA sequence for 11143, showing homology to Human Acidic Ribosomal Phosphoprotein PO mRNA.

[0126] SEQ ID NO: 86 is the determined cDNA sequence for 11144, showing homology to H. sapiens U21 mRNA.

[0127] SEQ ID NO: 87 is the determined cDNA sequence for 11145, showing homology to Human GTP-binding protein.

[0128] SEQ ID NO: 88 is the determined cDNA sequence for 11148, showing homology to H. sapiens U21 mRNA.

[0129] SEQ ID NO: 89 is the determined cDNA sequence for 11151, showing no significant homology to any known gene.

[0130] SEQ ID NO: 90 is the determined cDNA sequence for 11154, showing no significant homology to any known gene.

[0131] SEQ ID NO: 91 is the determined cDNA sequence for 11156, showing homology to H. sapiens Ribosomal Protein L27.

[0132] SEQ ID NO: 92 is the determined cDNA sequence for 11157, showing homology to H. sapiens Ribosomal Protein L27.

[0133] SEQ ID NO: 93 is the determined cDNA sequence for 11158, showing no significant homology to any known gene.

[0134] SEQ ID NO: 94 is the determined cDNA sequence for 11162, showing homology to Ag-X antigen.

[0135] SEQ ID NO: 95 is the determined cDNA sequence for 11164, showing homology to H. sapiens mRNA for Signal Recognition Protein sub 14.

[0136] SEQ ID NO: 96 is the determined cDNA sequence for 11165, showing homology to Human PAC 204e5/127h14.

[0137] SEQ ID NO: 97 is the determined cDNA sequence for 11166, showing homology to Human mRNA for KIAA0108.

[0138] SEQ ID NO: 98 is the determined cDNA sequence for 11167, showing homology to H. sapiens mRNA for Neutrophil Gelatinase asset. Lipocalin.

[0139] SEQ ID NO: 99 is the determined cDNA sequence for 11168, showing no significant homology to any known gene.

[0140] SEQ ID NO: 100 is the determined cDNA sequence for 11172, showing no significant homology to any known gene.

[0141] SEQ ID NO: 101 is the determined cDNA sequence for 11175, showing no significant homology to any known gene.

[0142] SEQ ID NO: 102 is the determined cDNA sequence for 11176, showing homology to Human maspin mRNA.

[0143] SEQ ID NO: 103 is the determined cDNA sequence for 11177, showing homology to Human Carcinoembryonic Antigen.

[0144] SEQ ID NO: 104 is the determined cDNA sequence for 11178, showing homology to Human A-Tubulin mRNA.

[0145] SEQ ID NO: 105 is the determined cDNA sequence for 11179, showing homology to Human mRNA for proton-ATPase-like protein.

[0146] SEQ ID NO: 106 is the determined cDNA sequence for 11180, showing homology to Human HepG2 3′ region cDNA clone hmd.

[0147] SEQ ID NO: 107 is the determined cDNA sequence for 11182, showing homology to Human MHC homologous to Chicken B-Complex Protein.

[0148] SEQ ID NO: 108 is the determined cDNA sequence for 11183, showing homology to Human High Mobility Group Box (SSRP1) mRNA.

[0149] SEQ ID NO: 109 is the determined cDNA sequence for 11184, showing no significant homology to any known gene.

[0150] SEQ ID NO: 110 is the determined cDNA sequence for 11185, showing no significant homology to any known gene.

[0151] SEQ ID NO: 111 is the determined cDNA sequence for 11187, showing no significant homology to any known gene.

[0152] SEQ ID NO: 112 is the determined cDNA sequence for 11190, showing homology to Human Replication Protein A 70 kDa.

[0153] SEQ ID NO: 113 is the determined cDNA sequence for Contig 47, also referred to as C797P, showing homology to Human Chromosome X clone bWXD342.

[0154] SEQ ID NO: 114 is the determined cDNA sequence for Contig 7, showing homology to Equilibrative Nucleoside Transporter 2 (ent2).

[0155] SEQ ID NO: 115 is the determined cDNA sequence for 14235.1, also referred to as C791P, showing homology to H. sapiens chromosome 21 derived BAC containing ets-2 gene.

[0156] SEQ ID NO: 116 is the determined cDNA sequence for 14287.2, showing no significant homology to any known gene, but some degree of homology to Putative Transmembrane Protein.

[0157] SEQ ID NO: 117 is the determined cDNA sequence for 14233.1, also referred to as Contig 48, showing no significant homology to any known gene.

[0158] SEQ ID NO: 118 is the determined cDNA sequence for 14298.2, also referred to as C793P, showing no significant homology to any known gene.

[0159] SEQ ID NO: 119 is the determined cDNA sequence for 14372, also referred to as Contig 44, showing no significant homology to any known gene.

[0160] SEQ ID NO: 120 is the determined cDNA sequence for 14295, showing homology to secreted cement gland protein XAG-2 homolog.

[0161] SEQ ID NO: 121 is the determined full-length cDNA sequence for a clone showing homology to Beta IG-H3.

[0162] SEQ ID NO: 122 is the predicted amino acid sequence for the clone of SEQ ID NO: 121.

[0163] SEQ ID NO: 123 is a longer determined cDNA sequence for C751P.

[0164] SEQ ID NO: 124 is a longer determined cDNA sequence for C791P.

[0165] SEQ ID NO: 125 is a longer determined cDNA sequence for C792P.

[0166] SEQ ID NO: 126 is a longer determined cDNA sequence for C793P.

[0167] SEQ ID NO: 127 is a longer determined cDNA sequence for C794P.

[0168] SEQ ID NO: 128 is a longer determined cDNA sequence for C795P.

[0169] SEQ ID NO: 129 is a longer determined cDNA sequence for C796P.

[0170] SEQ ID NO: 130 is a longer determined cDNA sequence for C797P.

[0171] SEQ ID NO: 131 is a longer determined cDNA sequence for C798P.

[0172] SEQ ID NO: 132 is a longer determined cDNA sequence for C799P.

[0173] SEQ ID NO: 133 is a first partial determined cDNA sequence for CoSub-3 (also known as 23569).

[0174] SEQ ID NO: 134 is a second partial determined cDNA sequence for CoSub-3 (also known as 23569).

[0175] SEQ ID NO: 135 is a first partial determined cDNA sequence for CoSub-13 (also known as 23579).

[0176] SEQ ID NO: 136 is a second partial determined cDNA sequence for CoSub-13 (also known as 23579).

[0177] SEQ ID NO: 137 is the determined cDNA sequence for CoSub-17 (also known as 23583).

[0178] SEQ ID NO: 138 is the determined cDNA sequence for CoSub-19 (also known as 23585).

[0179] SEQ ID NO: 139 is the determined cDNA sequence for CoSub-22 (also known as 23714).

[0180] SEQ ID NO: 140 is the determined cDNA sequence for CoSub-23 (also known as 23715).

[0181] SEQ ID NO: 141 is the determined cDNA sequence for CoSub-26 (also known as 23717).

[0182] SEQ ID NO: 142 is the determined cDNA sequence for CoSub-33 (also known as 23724).

[0183] SEQ ID NO: 143 is the determined cDNA sequence for CoSub-34 (also known as 23725).

[0184] SEQ ID NO: 144 is the determined cDNA sequence for CoSub-35 (also known as 23726).

[0185] SEQ ID NO: 145 is the determined cDNA sequence for CoSub-37 (also known as 23728).

[0186] SEQ ID NO: 146 is the determined cDNA sequence for CoSub-39 (also known as 23730).

[0187] SEQ ID NO: 147 is the determined cDNA sequence for CoSub-42 (also known as 23766).

[0188] SEQ ID NO: 148 is the determined cDNA sequence for CoSub-44 (also known as 23768).

[0189] SEQ ID NO: 149 is the determined cDNA sequence for CoSub-47 (also known as 23771).

[0190] SEQ ID NO: 150 is the determined cDNA sequence for CoSub-54 (also known as 23778).

[0191] SEQ ID NO: 151 is the determined cDNA sequence for CoSub-55 (also known as 23779).

[0192] SEQ ID NO: 152 is the determined cDNA sequence for CT1 (also known as 24099).

[0193] SEQ ID NO: 153 is the determined cDNA sequence for CT2 (also known as 24100).

[0194] SEQ ID NO: 154 is the determined cDNA sequence for CT3 (also known as 24101).

[0195] SEQ ID NO: 155 is the determined cDNA sequence for CT6 (also known as 24104).

[0196] SEQ ID NO: 156 is the determined cDNA sequence for CT7 (also known as 24105).

[0197] SEQ ID NO: 157 is the determined cDNA sequence for CT12 (also known as 24110).

[0198] SEQ ID NO: 158 is the determined cDNA sequence for CT13 (also known as 20 24111).

[0199] SEQ ID NO: 159 is the determined cDNA sequence for CT14 (also known as 24112).

[0200] SEQ ID NO: 160 is the determined cDNA sequence for CT15 (also known as 24113).

[0201] SEQ ID NO: 161 is the determined cDNA sequence for CT17 (also known as 24115).

[0202] SEQ ID NO: 162 is the determined cDNA sequence for CT18 (also known as 24116).

[0203] SEQ ID NO: 163 is the determined cDNA sequence for CT22 (also known as 30 23848).

[0204] SEQ ID NO: 164 is the determined cDNA sequence for CT24 (also known as 23849).

[0205] SEQ ID NO: 165 is the determined cDNA sequence for CT31 (also known as 23854).

[0206] SEQ ID NO: 166 is the determined cDNA sequence for CT34 (also known as 23856).

[0207] SEQ ID NO: 167 is the determined cDNA sequence for CT37 (also known as 23859).

[0208] SEQ ID NO: 168 is the determined cDNA sequence for CT39 (also known as 23860).

[0209] SEQ ID NO: 169 is the determined cDNA sequence for CT40 (also known as 23861).

[0210] SEQ ID NO: 170 is the determined cDNA sequence for CT51 (also known as 24130).

[0211] SEQ ID NO: 171 is the determined cDNA sequence for CT53 (also known as 24132).

[0212] SEQ ID NO: 172 is the determined cDNA sequence for CT63 (also known as 24595).

[0213] SEQ ID NO: 173 is the determined cDNA sequence for CT88 (also known as 24608).

[0214] SEQ ID NO: 174 is the determined cDNA sequence for CT92 (also known as 24800).

[0215] SEQ ID NO: 175 is the determined cDNA sequence for CT94 (also known as 24802).

[0216] SEQ ID NO: 176 is the determined cDNA sequence for CT102 (also known as 24805).

[0217] SEQ ID NO: 177 is the determined cDNA sequence for CT103 (also known as 24806).

[0218] SEQ ID NO: 178 is the determined cDNA sequence for CT111 (also known as 25520).

[0219] SEQ ID NO: 179 is the determined cDNA sequence for CT118 (also known as 25522).

[0220] SEQ ID NO: 180 is the determined cDNA sequence for CT121 (also known as 25523).

[0221] SEQ ID NO: 181 is the determined cDNA sequence for CT126 (also known as 25527).

[0222] SEQ ID NO: 182 is the determined cDNA sequence for CT135 (also known as 25534).

[0223] SEQ ID NO: 183 is the determined cDNA sequence for CT140 (also known as 25537).

[0224] SEQ ID NO: 184 is the determined cDNA sequence for CT145 (also known as 25542).

[0225] SEQ ID NO: 185 is the determined cDNA sequence for CT147 (also known as 25543).

[0226] SEQ ID NO: 186 is the determined cDNA sequence for CT148 (also known as 25544).

[0227] SEQ ID NO: 187 is the determined cDNA sequence for CT502 (also known as 26420).

[0228] SEQ ID NO: 188 is the determined cDNA sequence for CT507 (also known as 26425).

[0229] SEQ ID NO: 189 is the determined cDNA sequence for CT521 (also known as 27366).

[0230] SEQ ID NO: 190 is the determined cDNA sequence for CT544 (also known as 27375).

[0231] SEQ ID NO: 191 is the determined cDNA sequence for CT577 (also known as 27385).

[0232] SEQ ID NO: 192 is the determined cDNA sequence for CT580 (also known as 27387).

[0233] SEQ ID NO: 193 is the determined cDNA sequence for CT594 (also known as 27540).

[0234] SEQ ID NO: 194 is the determined cDNA sequence for CT606 (also known as 27547).

[0235] SEQ ID NO: 195 is the determined cDNA sequence for CT607 (also known as 27548).

[0236] SEQ ID NO: 196 is the determined cDNA sequence for CT599 (also known as 27903).

[0237] SEQ ID NO: 197 is the determined cDNA sequence for CT632 (also known as 27922).

[0238] SEQ ID NO: 198 is the predicted amino acid sequence for CT502 (SEQ ID NO: 187).

[0239] SEQ ID NO: 199 is the predicted amino acid sequence for CT507 (SEQ ID NO: 188).

[0240] SEQ ID NO: 200 is the predicted amino acid sequence for CT521 (SEQ ID NO: 189).

[0241] SEQ ID NO: 201 is the predicted amino acid sequence for CT544 (SEQ ID NO: 190).

[0242] SEQ ID NO: 202 is the predicted amino acid sequence for CT606 (SEQ ID NO: 194).

[0243] SEQ ID NO: 203 is the predicted amino acid sequence for CT607 (SEQ ID NO: 195).

[0244] SEQ ID NO: 204 is the predicted amino acid sequence for CT632 (SEQ ID NO: 197).

[0245] SEQ ID NO: 205 is the determined cDNA sequence for clone 25244.

[0246] SEQ ID NO: 206 is the determined cDNA sequence for clone 25245.

[0247] SEQ ID NO: 207 is the determined cDNA sequence for clone 25246.

[0248] SEQ ID NO: 208 is the determined cDNA sequence for clone 25248.

[0249] SEQ ID NO: 209 is the determined cDNA sequence for clone 25249.

[0250] SEQ ID NO: 210 is the determined cDNA sequence for clone 25250.

[0251] SEQ ID NO: 211 is the determined cDNA sequence for clone 25251.

[0252] SEQ ID NO: 212 is the determined cDNA sequence for clone 25252.

[0253] SEQ ID NO: 213 is the determined cDNA sequence for clone 25253.

[0254] SEQ ID NO: 214 is the determined cDNA sequence for clone 25254.

[0255] SEQ ID NO: 215 is the determined cDNA sequence for clone 25255.

[0256] SEQ ID NO: 216 is the determined cDNA sequence for clone 25256.

[0257] SEQ ID NO: 217 is the determined cDNA sequence for clone 25257.

[0258] SEQ ID NO: 218 is the determined cDNA sequence for clone 25259.

[0259] SEQ ID NO: 219 is the determined cDNA sequence for clone 25260.

[0260] SEQ ID NO: 220 is the determined cDNA sequence for clone 25261.

[0261] SEQ ID NO: 221 is the determined cDNA sequence for clone 25262.

[0262] SEQ ID NO: 222 is the determined cDNA sequence for clone 25263.

[0263] SEQ ID NO: 223 is the determined cDNA sequence for clone 25264.

[0264] SEQ ID NO: 224 is the determined cDNA sequence for clone 25265.

[0265] SEQ ID NO: 225 is the determined cDNA sequence for clone 25266.

[0266] SEQ ID NO: 226 is the determined cDNA sequence for clone 25267.

[0267] SEQ ID NO: 227 is the determined cDNA sequence for clone 25268.

[0268] SEQ ID NO: 228 is the determined cDNA sequence for clone 25269.

[0269] SEQ ID NO: 229 is the determined cDNA sequence for clone 25271.

[0270] SEQ ID NO: 230 is the determined cDNA sequence for clone 25272.

[0271] SEQ ID NO: 231 is the determined cDNA sequence for clone 25273.

[0272] SEQ ID NO: 232 is the determined cDNA sequence for clone 25274.

[0273] SEQ ID NO: 233 is the determined cDNA sequence for clone 25275.

[0274] SEQ ID NO: 234 is the determined cDNA sequence for clone 25276.

[0275] SEQ ID NO: 235 is the determined cDNA sequence for clone 25277.

[0276] SEQ ID NO: 236 is the determined cDNA sequence for clone 25278.

[0277] SEQ ID NO: 237 is the determined cDNA sequence for clone 25280.

[0278] SEQ ID NO: 238 is the determined cDNA sequence for clone 25281.

[0279] SEQ ID NO: 239 is the determined cDNA sequence for clone 25282.

[0280] SEQ ID NO: 240 is the determined cDNA sequence for clone 25283.

[0281] SEQ ID NO: 241 is the determined cDNA sequence for clone 25284.

[0282] SEQ ID NO: 242 is the determined cDNA sequence for clone 25285.

[0283] SEQ ID NO: 243 is the determined cDNA sequence for clone 25286.

[0284] SEQ ID NO: 244 is the determined cDNA sequence for clone 25287.

[0285] SEQ ID NO: 245 is the determined cDNA sequence for clone 25288.

[0286] SEQ ID NO: 246 is the determined cDNA sequence for clone 25289.

[0287] SEQ ID NO: 247 is the determined cDNA sequence for clone 25290.

[0288] SEQ ID NO: 248 is the determined cDNA sequence for clone 25291.

[0289] SEQ ID NO: 249 is the determined cDNA sequence for clone 25292.

[0290] SEQ ID NO: 250 is the determined cDNA sequence for clone 25293.

[0291] SEQ ID NO: 251 is the determined cDNA sequence for clone 25294.

[0292] SEQ ID NO: 252 is the determined cDNA sequence for clone 25295.

[0293] SEQ ID NO: 253 is the determined cDNA sequence for clone 25296.

[0294] SEQ ID NO: 254 is the determined cDNA sequence for clone 25297.

[0295] SEQ ID NO: 255 is the determined cDNA sequence for clone 25418.

[0296] SEQ ID NO: 256 is the determined cDNA sequence for clone 25419.

[0297] SEQ ID NO: 257 is the determined cDNA sequence for clone 25420.

[0298] SEQ ID NO: 258 is the determined cDNA sequence for clone 25421.

[0299] SEQ ID NO: 259 is the determined cDNA sequence for clone 25422.

[0300] SEQ ID NO: 260 is the determined cDNA sequence for clone 25423.

[0301] SEQ ID NO: 261 is the determined cDNA sequence for clone 25424.

[0302] SEQ ID NO: 262 is the determined cDNA sequence for clone 25426.

[0303] SEQ ID NO: 263 is the determined cDNA sequence for clone 25427.

[0304] SEQ ID NO: 264 is the determined cDNA sequence for clone 25428.

[0305] SEQ ID NO: 265 is the determined cDNA sequence for clone 25429.

[0306] SEQ ID NO: 266 is the determined cDNA sequence for clone 25430.

[0307] SEQ ID NO: 267 is the determined cDNA sequence for clone 25431.

[0308] SEQ ID NO: 268 is the determined cDNA sequence for clone 25432.

[0309] SEQ ID NO: 269 is the determined cDNA sequence for clone 25433.

[0310] SEQ ID NO: 270 is the determined cDNA sequence for clone 25434.

[0311] SEQ ID NO: 271 is the determined cDNA sequence for clone 25435.

[0312] SEQ ID NO: 272 is the determined cDNA sequence for clone 25436.

[0313] SEQ ID NO: 273 is the determined cDNA sequence for clone 25437.

[0314] SEQ ID NO: 274 is the determined cDNA sequence for clone 25438.

[0315] SEQ ID NO: 275 is the determined cDNA sequence for clone 25439.

[0316] SEQ ID NO: 276 is the determined cDNA sequence for clone 25440.

[0317] SEQ ID NO: 277 is the determined cDNA sequence for clone 25441.

[0318] SEQ ID NO: 278 is the determined cDNA sequence for clone 25442.

[0319] SEQ ID NO: 279 is the determined cDNA sequence for clone 25443.

[0320] SEQ ID NO: 280 is the determined cDNA sequence for clone 25444.

[0321] SEQ ID NO: 281 is the determined cDNA sequence for clone 25445.

[0322] SEQ ID NO: 282 is the determined cDNA sequence for clone 25446.

[0323] SEQ ID NO: 283 is the determined cDNA sequence for clone 25447.

[0324] SEQ ID NO: 284 is the determined cDNA sequence for clone 25448.

[0325] SEQ ID NO: 285 is the determined cDNA sequence for clone 25844.

[0326] SEQ ID NO: 286 is the determined cDNA sequence for clone 25845.

[0327] SEQ ID NO: 287 is the determined cDNA sequence for clone 25846.

[0328] SEQ ID NO: 288 is the determined cDNA sequence for clone 25847.

[0329] SEQ ID NO: 289 is the determined cDNA sequence for clone 25848.

[0330] SEQ ID NO: 290 is the determined cDNA sequence for clone 25850.

[0331] SEQ ID NO: 291 is the determined cDNA sequence for clone 25851.

[0332] SEQ ID NO: 292 is the determined cDNA sequence for clone 25852.

[0333] SEQ ID NO: 293 is the determined cDNA sequence for clone 25853.

[0334] SEQ ID NO: 294 is the determined cDNA sequence for clone 25854.

[0335] SEQ ID NO: 295 is the determined cDNA sequence for clone 25855.

[0336] SEQ ID NO: 296 is the determined cDNA sequence for clone 25856.

[0337] SEQ ID NO: 297 is the determined cDNA sequence for clone 25857.

[0338] SEQ ID NO: 298 is the determined cDNA sequence for clone 25858.

[0339] SEQ ID NO: 299 is the determined cDNA sequence for clone 25859.

[0340] SEQ ID NO: 300 is the determined cDNA sequence for clone 25860.

[0341] SEQ ID NO: 301 is the determined cDNA sequence for clone 25861.

[0342] SEQ ID NO: 302 is the determined cDNA sequence for clone 25862.

[0343] SEQ ID NO: 303 is the determined cDNA sequence for clone 25863.

[0344] SEQ ID NO: 304 is the determined cDNA sequence for clone 25864.

[0345] SEQ ID NO: 305 is the determined cDNA sequence for clone 25865.

[0346] SEQ ID NO: 306 is the determined cDNA sequence for clone 25866.

[0347] SEQ ID NO: 307 is the determined cDNA sequence for clone 25867.

[0348] SEQ ID NO: 308 is the determined cDNA sequence for clone 25868.

[0349] SEQ ID NO: 309 is the determined cDNA sequence for clone 25869.

[0350] SEQ ID NO: 310 is the determined cDNA sequence for clone 25870.

[0351] SEQ ID NO: 311 is the determined cDNA sequence for clone 25871.

[0352] SEQ ID NO: 312 is the determined cDNA sequence for clone 25872.

[0353] SEQ ID NO: 313 is the determined cDNA sequence for clone 25873.

[0354] SEQ ID NO: 314 is the determined cDNA sequence for clone 25875.

[0355] SEQ ID NO: 315 is the determined cDNA sequence for clone 25876.

[0356] SEQ ID NO: 316 is the determined cDNA sequence for clone 25877.

[0357] SEQ ID NO: 317 is the determined cDNA sequence for clone 25878.

[0358] SEQ ID NO: 318 is the determined cDNA sequence for clone 25879.

[0359] SEQ ID NO: 319 is the determined cDNA sequence for clone 25880.

[0360] SEQ ID NO: 320 is the determined cDNA sequence for clone 25881.

[0361] SEQ ID NO: 321 is the determined cDNA sequence for clone 25882.

[0362] SEQ ID NO: 322 is the determined cDNA sequence for clone 25883.

[0363] SEQ ID NO: 323 is the determined cDNA sequence for clone 25884.

[0364] SEQ ID NO: 324 is the determined cDNA sequence for clone 25885.

[0365] SEQ ID NO: 325 is the determined cDNA sequence for clone 25886.

[0366] SEQ ID NO: 326 is the determined cDNA sequence for clone 25887.

[0367] SEQ ID NO: 327 is the determined cDNA sequence for clone 25888.

[0368] SEQ ID NO: 328 is the determined cDNA sequence for clone 25889.

[0369] SEQ ID NO: 329 is the determined cDNA sequence for clone 25890.

[0370] SEQ ID NO: 330 is the determined cDNA sequence for clone 25892.

[0371] SEQ ID NO: 331 is the determined cDNA sequence for clone 25894.

[0372] SEQ ID NO: 332 is the determined cDNA sequence for clone 25895.

[0373] SEQ ID NO: 333 is the determined cDNA sequence for clone 25896.

[0374] SEQ ID NO: 334 is the determined cDNA sequence for clone 25897.

[0375] SEQ ID NO: 335 is the determined cDNA sequence for clone 25899.

[0376] SEQ ID NO: 336 is the determined cDNA sequence for clone 25900.

[0377] SEQ ID NO: 337 is the determined cDNA sequence for clone 25901.

[0378] SEQ ID NO: 338 is the determined cDNA sequence for clone 25902.

[0379] SEQ ID NO: 339 is the determined cDNA sequence for clone 25903.

[0380] SEQ ID NO: 340 is the determined cDNA sequence for clone 25904.

[0381] SEQ ID NO: 341 is the determined cDNA sequence for clone 25906.

[0382] SEQ ID NO: 342 is the determined cDNA sequence for clone 25907.

[0383] SEQ ID NO: 343 is the determined cDNA sequence for clone 25908.

[0384] SEQ ID NO: 344 is the determined cDNA sequence for clone 25909.

[0385] SEQ ID NO: 345 is the determined cDNA sequence for clone 25910.

[0386] SEQ ID NO: 346 is the determined cDNA sequence for clone 25911.

[0387] SEQ ID NO: 347 is the determined cDNA sequence for clone 25912.

[0388] SEQ ID NO: 348 is the determined cDNA sequence for clone 25913.

[0389] SEQ ID NO: 349 is the determined cDNA sequence for clone 25914.

[0390] SEQ ID NO: 350 is the determined cDNA sequence for clone 25915.

[0391] SEQ ID NO: 351 is the determined cDNA sequence for clone 25916.

[0392] SEQ ID NO: 352 is the determined cDNA sequence for clone 25917.

[0393] SEQ ID NO: 353 is the determined cDNA sequence for clone 25918.

[0394] SEQ ID NO: 354 is the determined cDNA sequence for clone 25919.

[0395] SEQ ID NO: 355 is the determined cDNA sequence for clone 25920.

[0396] SEQ ID NO: 356 is the determined cDNA sequence for clone 25921.

[0397] SEQ ID NO: 357 is the determined cDNA sequence for clone 25922.

[0398] SEQ ID NO: 358 is the determined cDNA sequence for clone 25924.

[0399] SEQ ID NO: 359 is the determined cDNA sequence for clone 25925.

[0400] SEQ ID NO: 360 is the determined cDNA sequence for clone 25926.

[0401] SEQ ID NO: 361 is the determined cDNA sequence for clone 25927.

[0402] SEQ ID NO: 362 is the determined cDNA sequence for clone 25928.

[0403] SEQ ID NO: 363 is the determined cDNA sequence for clone 25929.

[0404] SEQ ID NO: 364 is the determined cDNA sequence for clone 25930.

[0405] SEQ ID NO: 365 is the determined cDNA sequence for clone 25931.

[0406] SEQ ID NO: 366 is the determined cDNA sequence for clone 25932.

[0407] SEQ ID NO: 367 is the determined cDNA sequence for clone 25933.

[0408] SEQ ID NO: 368 is the determined cDNA sequence for clone 25934.

[0409] SEQ ID NO: 369 is the determined cDNA sequence for clone 25935.

[0410] SEQ ID NO: 370 is the determined cDNA sequence for clone 25936.

[0411] SEQ ID NO: 371 is the determined cDNA sequence for clone 25939.

[0412] SEQ ID NO: 372 is the determined cDNA sequence for clone 32016.

[0413] SEQ ID NO: 373 is the determined cDNA sequence for clone 32021.

[0414] SEQ ID NO: 374 is the determined cDNA sequence for clone 31993.

[0415] SEQ ID NO: 375 is the determined cDNA sequence for clone 31997.

[0416] SEQ ID NO: 376 is the determined cDNA sequence for clone 31942.

[0417] SEQ ID NO: 377 is the determined cDNA sequence for clone 31937.

[0418] SEQ ID NO: 378 is the determined cDNA sequence for clone 31952.

[0419] SEQ ID NO: 379 is the determined cDNA sequence for clone 31992.

[0420] SEQ ID NO: 380 is the determined cDNA sequence for clone 31961.

[0421] SEQ ID NO: 381 is the determined cDNA sequence for clone 31964.

[0422] SEQ ID NO: 382 is the determined cDNA sequence for clone 32005.

[0423] SEQ ID NO: 383 is the determined cDNA sequence for clone 31980.

[0424] SEQ ID NO: 384 is the determined cDNA sequence for clone 31940.

[0425] SEQ ID NO: 385 is the determined cDNA sequence for clone 32004.

[0426] SEQ ID NO: 386 is the determined cDNA sequence for clone 31956.

[0427] SEQ ID NO: 387 is the determined cDNA sequence for clone 31934.

[0428] SEQ ID NO: 388 is the determined cDNA sequence for clone 31998.

[0429] SEQ ID NO: 389 is the determined cDNA sequence for clone 31973.

[0430] SEQ ID NO: 390 is the determined cDNA sequence for clone 31976.

[0431] SEQ ID NO: 391 is the determined cDNA sequence for clone 31988.

[0432] SEQ ID NO: 392 is the determined cDNA sequence for clone 31948.

[0433] SEQ ID NO: 393 is the determined cDNA sequence for clone 32013.

[0434] SEQ ID NO: 394 is the determined cDNA sequence for clone 31986.

[0435] SEQ ID NO: 395 is the determined cDNA sequence for clone 31954.

[0436] SEQ ID NO: 396 is the determined cDNA sequence for clone 31987.

[0437] SEQ ID NO: 397 is the determined cDNA sequence for clone 32029.

[0438] SEQ ID NO: 398 is the determined cDNA sequence for clone 32028.

[0439] SEQ ID NO: 399 is the determined cDNA sequence for clone 32012.

[0440] SEQ ID NO: 400 is the determined cDNA sequence for clone 31959.

[0441] SEQ ID NO: 401 is the determined cDNA sequence for clone 32027.

[0442] SEQ ID NO: 402 is the determined cDNA sequence for clone 31957.

[0443] SEQ ID NO: 403 is the determined cDNA sequence for clone 31950.

[0444] SEQ ID NO: 404 is the determined cDNA sequence for clone 32011.

[0445] SEQ ID NO: 405 is the determined cDNA sequence for clone 32022.

[0446] SEQ ID NO: 406 is the determined cDNA sequence for clone 32014.

[0447] SEQ ID NO: 407 is the determined cDNA sequence for clone 31963.

[0448] SEQ ID NO: 408 is the determined cDNA sequence for clone 31989.

[0449] SEQ ID NO: 409 is the determined cDNA sequence for clone 32015.

[0450] SEQ ID NO: 410 is the determined cDNA sequence for clone 32002.

[0451] SEQ ID NO: 411 is the determined cDNA sequence for clone 31939.

[0452] SEQ ID NO: 412 is the determined cDNA sequence for clone 32003.

[0453] SEQ ID NO: 413 is the determined cDNA sequence for clone 31936.

[0454] SEQ ID NO: 414 is the determined cDNA sequence for clone 32007.

[0455] SEQ ID NO: 415 is the determined cDNA sequence for clone 31965.

[0456] SEQ ID NO: 416 is the determined cDNA sequence for clone 31935.

[0457] SEQ ID NO: 417 is the determined cDNA sequence for clone 32008.

[0458] SEQ ID NO: 418 is the determined cDNA sequence for clone 31966.

[0459] SEQ ID NO: 419 is the determined cDNA sequence for clone 32020.

[0460] SEQ ID NO: 420 is the determined cDNA sequence for clone 31971.

[0461] SEQ ID NO: 421 is the determined cDNA sequence for clone 31977.

[0462] SEQ ID NO: 422 is the determined cDNA sequence for clone 31985.

[0463] SEQ ID NO: 423 is the determined cDNA sequence for clone 32023.

[0464] SEQ ID NO: 424 is the determined cDNA sequence for clone 31981.

[0465] SEQ ID NO: 425 is the determined cDNA sequence for clone 32006.

[0466] SEQ ID NO: 426 is the determined cDNA sequence for clone 31991.

[0467] SEQ ID NO: 427 is the determined cDNA sequence for clone 31995.

[0468] SEQ ID NO: 428 is the determined cDNA sequence for clone 32000.

[0469] SEQ ID NO: 429 is the determined cDNA sequence for clone 31990.

[0470] SEQ ID NO: 430 is the determined cDNA sequence for clone 31946.

[0471] SEQ ID NO: 431 is the determined cDNA sequence for clone 31938.

[0472] SEQ ID NO: 432 is the determined cDNA sequence for clone 31941.

[0473] SEQ ID NO: 433 is the determined cDNA sequence for clone 31982.

[0474] SEQ ID NO: 434 is the determined cDNA sequence for clone 31996.

[0475] SEQ ID NO: 435 is the determined cDNA sequence for clone 32010.

[0476] SEQ ID NO: 436 is the determined cDNA sequence for clone 31974.

[0477] SEQ ID NO: 437 is the determined cDNA sequence for clone 31983.

[0478] SEQ ID NO: 438 is the determined cDNA sequence for clone 31999.

[0479] SEQ ID NO: 439 is the determined cDNA sequence for clone 31949.

[0480] SEQ ID NO: 440 is the determined cDNA sequence for clone 31947.

[0481] SEQ ID NO: 441 is the determined cDNA sequence for clone 31994.

[0482] SEQ ID NO: 442 is the determined cDNA sequence for clone 31958.

[0483] SEQ ID NO: 443 is the determined cDNA sequence for clone 31975.

[0484] SEQ ID NO: 444 is the determined cDNA sequence for clone 31984.

[0485] SEQ ID NO: 445 is the determined cDNA sequence for clone 32024.

[0486] SEQ ID NO: 446 is the determined cDNA sequence for clone 31972.

[0487] SEQ ID NO: 447 is the determined cDNA sequence for clone 31943.

[0488] SEQ ID NO: 448 is the determined cDNA sequence for clone 32018.

[0489] SEQ ID NO: 449 is the determined cDNA sequence for clone 32026.

[0490] SEQ ID NO: 450 is the determined cDNA sequence for clone 32009.

[0491] SEQ ID NO: 451 is the determined cDNA sequence for clone 32019.

[0492] SEQ ID NO: 452 is the determined cDNA sequence for clone 32025.

[0493] SEQ ID NO: 453 is the determined cDNA sequence for clone 31967.

[0494] SEQ ID NO: 454 is the determined cDNA sequence for clone 31968.

[0495] SEQ ID NO: 455 is the determined cDNA sequence for clone 31955.

[0496] SEQ ID NO: 456 is the determined cDNA sequence for clone 31951.

[0497] SEQ ID NO: 457 is the determined cDNA sequence for clone 31970.

[0498] SEQ ID NO: 458 is the determined cDNA sequence for clone 31962.

[0499] SEQ ID NO: 459 is the determined cDNA sequence for clone 32001.

[0500] SEQ ID NO: 460 is the determined cDNA sequence for clone 31953.

[0501] SEQ ID NO: 461 is the determined cDNA sequence for clone 31944.

[0502] SEQ ID NO: 462 is the determined cDNA sequence for clone 31825.

[0503] SEQ ID NO: 463 is the determined cDNA sequence for clone 31828.

[0504] SEQ ID NO: 464 is the determined cDNA sequence for clone 31830.

[0505] SEQ ID NO: 465 is the determined cDNA sequence for clone 31841.

[0506] SEQ ID NO: 466 is the determined cDNA sequence for clone 31847.

[0507] SEQ ID NO: 467 is the determined cDNA sequence for clone 31850.

[0508] SEQ ID NO: 468 is the determined cDNA sequence for clone 31852.

[0509] SEQ ID NO: 469 is the determined cDNA sequence for clone 31855.

[0510] SEQ ID NO: 470 is the determined cDNA sequence for clone 31858.

[0511] SEQ ID NO: 471 is the determined cDNA sequence for clone 31861.

[0512] SEQ ID NO: 472 is the determined cDNA sequence for clone 31868.

[0513] SEQ ID NO: 473 is the determined cDNA sequence for clone 31870.

[0514] SEQ ID NO: 474 is the determined cDNA sequence for clone 31872.

[0515] SEQ ID NO: 475 is the determined cDNA sequence for clone 31873.

[0516] SEQ ID NO: 476 is the determined cDNA sequence for clone 31877.

[0517] SEQ ID NO: 477 is the determined cDNA sequence for clone 31878.

[0518] SEQ ID NO. 478 is the determined cDNA sequence for clone 31885.

[0519] SEQ ID NO: 479 is the determined cDNA sequence for clone 31888.

[0520] SEQ ID NO: 480 is the determined cDNA sequence for clone 31890.

[0521] SEQ ID NO: 481 is the determined cDNA sequence for clone 31893.

[0522] SEQ ID NO: 482 is the determined cDNA sequence for clone 31898.

[0523] SEQ ID NO: 483 is the determined cDNA sequence for clone 31901.

[0524] SEQ ID NO: 484 is the determined cDNA sequence for clone 31909.

[0525] SEQ ID NO: 485 is the determined cDNA sequence for clone 31910.

[0526] SEQ ID NO: 486 is the determined cDNA sequence for clone 31914.

[0527] SEQ ID NO: 487 is the determined cDNA sequence for contig 1.

[0528] SEQ ID NO: 488 is the determined cDNA sequence for contig 2.

[0529] SEQ ID NO: 489 is the determined cDNA sequence for contig 3.

[0530] SEQ ID NO: 490 is the determined cDNA sequence for contig 4.

[0531] SEQ ID NO: 491 is the determined cDNA sequence for contig 5.

[0532] SEQ ID NO: 492 is the determined cDNA sequence for contig 6.

[0533] SEQ ID NO: 493 is the determined cDNA sequence for contig 7.

[0534] SEQ ID NO: 494 is the determined cDNA sequence for contig 8.

[0535] SEQ ID NO: 495 is the determined cDNA sequence for contig 9.

[0536] SEQ ID NO: 496 is the determined cDNA sequence for contig 10.

[0537] SEQ ID NO: 497 is the determined cDNA sequence for contig 11.

[0538] SEQ ID NO: 498 is the determined cDNA sequence for contig 12.

[0539] SEQ ID NO: 499 is the determined cDNA sequence for contig 13.

[0540] SEQ ID NO: 500 is the determined cDNA sequence for contig 14.

[0541] SEQ ID NO: 501 is the determined cDNA sequence for contig 15.

[0542] SEQ ID NO: 502 is the determined cDNA sequence for contig 16.

[0543] SEQ ID NO: 503 is the determined cDNA sequence for contig 17.

[0544] SEQ ID NO: 504 is the determined cDNA sequence for contig 18.

[0545] SEQ ID NO: 505 is the determined cDNA sequence for contig 19.

[0546] SEQ ID NO: 506 is the determined cDNA sequence for contig 20.

[0547] SEQ ID NO: 507 is the determined cDNA sequence for contig 21.

[0548] SEQ ID NO: 508 is the determined cDNA sequence for contig 22.

[0549] SEQ ID NO: 509 is the determined cDNA sequence for contig 23.

[0550] SEQ ID NO: 510 is the determined cDNA sequence for contig 24.

[0551] SEQ ID NO: 511 is the determined cDNA sequence for contig 25.

[0552] SEQ ID NO: 512 is the determined cDNA sequence for contig 26.

[0553] SEQ ID NO: 513 is the determined cDNA sequence for contig 27.

[0554] SEQ ID NO: 514 is the determined cDNA sequence for contig 28.

[0555] SEQ ID NO: 515 is the determined cDNA sequence for contig 29.

[0556] SEQ ID NO: 516 is the determined cDNA sequence for contig 30.

[0557] SEQ ID NO: 517 is the determined cDNA sequence for contig 31.

[0558] SEQ ID NO: 518 is the determined cDNA sequence for contig 32.

[0559] SEQ ID NO: 519 is the determined cDNA sequence for contig 33.

[0560] SEQ ID NO: 520 is the determined cDNA sequence for contig 34.

[0561] SEQ ID NO: 521 is the determined cDNA sequence for contig 35.

[0562] SEQ ID NO: 522 is the determined cDNA sequence for contig 36.

[0563] SEQ ID NO: 523 is the determined cDNA sequence for contig 37.

[0564] SEQ ID NO: 524 is the determined cDNA sequence for contig 38.

[0565] SEQ ID NO: 525 is the determined cDNA sequence for contig 39.

[0566] SEQ ID NO: 526 is the determined cDNA sequence for contig 40.

[0567] SEQ ID NO: 527 is the determined cDNA sequence for contig 41.

[0568] SEQ ID NO: 528 is the determined cDNA sequence for contig 42.

[0569] SEQ ID NO: 529 is the determined cDNA sequence for contig 43.

[0570] SEQ ID NO: 530 is the determined cDNA sequence for contig 44.

[0571] SEQ ID NO: 531 is the determined cDNA sequence for contig 45.

[0572] SEQ ID NO: 532 is the determined cDNA sequence for contig 46.

[0573] SEQ ID NO: 533 is the determined cDNA sequence for contig 47.

[0574] SEQ ID NO: 534 is the determined cDNA sequence for contig 48.

[0575] SEQ ID NO: 535 is the determined cDNA sequence for contig 49.

[0576] SEQ ID NO: 536 is the determined cDNA sequence for contig 50.

[0577] SEQ ID NO: 537 is the determined cDNA sequence for contig 51.

[0578] SEQ ID NO: 538 is the determined cDNA sequence for contig 52.

[0579] SEQ ID NO: 539 is the determined cDNA sequence for contig 53.

[0580] SEQ ID NO: 540 is the determined cDNA sequence for contig 54.

[0581] SEQ ID NO: 541 is the determined cDNA sequence for contig 55.

[0582] SEQ ID NO: 542 is the determined cDNA sequence for contig 56.

[0583] SEQ ID NO: 543 is the determined cDNA sequence for contig 58.

[0584] SEQ ID NO: 544 is the determined cDNA sequence for contig 59.

[0585] SEQ ID NO: 545 is the determined cDNA sequence for contig 60.

[0586] SEQ ID NO: 546 is the determined cDNA sequence for contig 61.

[0587] SEQ ID NO: 547 is the determined cDNA sequence for contig 62.

[0588] SEQ ID NO: 548 is the determined cDNA sequence for contig 63.

[0589] SEQ ID NO: 549 is the determined cDNA sequence for contig 64.

[0590] SEQ ID NO: 550 is the determined cDNA sequence for contig 65.

[0591] SEQ ID NO: 551 is the determined cDNA sequence for contig 66.

[0592] SEQ ID NO: 552 is the determined cDNA sequence for contig 67.

[0593] SEQ ID NO: 553 is the determined cDNA sequence for contig 68.

[0594] SEQ ID NO: 554 is the determined cDNA sequence for contig 69.

[0595] SEQ ID NO: 555 is the determined cDNA sequence for contig 70.

[0596] SEQ ID NO: 556 is the determined cDNA sequence for contig 71.

[0597] SEQ ID NO: 557 is the determined cDNA sequence for contig 72.

[0598] SEQ ID NO: 558 is the determined cDNA sequence for contig 73.

[0599] SEQ ID NO: 559 is the determined cDNA sequence for contig 74.

[0600] SEQ ID NO: 560 is the determined cDNA sequence for contig 75.

[0601] SEQ ID NO: 561 is the determined cDNA sequence for contig 76.

[0602] SEQ ID NO: 562 is the determined cDNA sequence for contig 77.

[0603] SEQ ID NO: 563 is the determined cDNA sequence for contig 78.

[0604] SEQ ID NO: 564 is the determined cDNA sequence for contig 79.

[0605] SEQ ID NO: 565 is the determined cDNA sequence for contig 80.

[0606] SEQ ID NO: 566 is the determined cDNA sequence for contig 81.

[0607] SEQ ID NO: 567 is the determined cDNA sequence for contig 82.

[0608] SEQ ID NO: 568 is the determined cDNA sequence for contig 83.

[0609] SEQ ID NO: 569 is the determined cDNA sequence for clone CS1-101.

[0610] SEQ ID NO: 570 is the determined cDNA sequence for clone CS1-102.

[0611] SEQ ID NO: 571 is the determined cDNA sequence for clone CS1-104.

[0612] SEQ ID NO: 572 is the determined cDNA sequence for clone CS1-105.

[0613] SEQ ID NO: 573 is the determined 3′ cDNA sequence for clone CS1-106.

[0614] SEQ ID NO: 574 is the determined 5′ cDNA sequence for clone CS 1-106.

[0615] SEQ ID NO: 575 is the determined cDNA sequence for clone CS1-114.

[0616] SEQ ID NO: 576 is the determined cDNA sequence for clone CS1-1 18.

[0617] SEQ ID NO: 577 is the determined cDNA sequence for clone CS1-120.

[0618] SEQ ID NO: 578 is the determined cDNA sequence for clone CS1-123.

[0619] SEQ ID NO: 579 is the determined 3′ cDNA sequence for clone CS1-124.

[0620] SEQ ID NO: 580 is the determined 5′ cDNA sequence for clone CS1-124.

[0621] SEQ ID NO: 581 is the determined cDNA sequence for clone CS1-128.

[0622] SEQ ID NO: 582 is the determined cDNA sequence for clone CS1-132.

[0623] SEQ ID NO: 583 is the determined cDNA sequence for clone CS1-136.

[0624] SEQ ID NO: 584 is the determined cDNA sequence for clone CS1-137.

[0625] SEQ ID NO: 585 is the determined cDNA sequence for clone CS1-139.

[0626] SEQ ID NO: 586 is the determined cDNA sequence for clone CS1-141.

[0627] SEQ ID NO: 587 is the determined cDNA sequence for clone CS1-152.

[0628] SEQ ID NO: 588 is the determined cDNA sequence for clone CS1-154.

[0629] SEQ ID NO: 589 is the determined cDNA sequence for clone CS1-156.

[0630] SEQ ID NO: 590 is the determined cDNA sequence for clone CS1-158.

[0631] SEQ ID NO: 591 is the determined cDNA sequence for clone CS1-160.

[0632] SEQ ID NO: 592 is the determined cDNA sequence for clone CS1-168.

[0633] SEQ ID NO: 593 is the determined cDNA sequence for clone CS1-169.

[0634] SEQ ID NO: 594 is the determined cDNA sequence for clone CS1-171.

[0635] SEQ ID NO: 595 is the determined cDNA sequence for clone CS1-176.

[0636] SEQ ID NO: 596 is the determined cDNA sequence for clone CS1-178.

[0637] SEQ ID NO: 597 is the determined cDNA sequence for clone CS1-180.

[0638] SEQ ID NO: 598 is the determined cDNA sequence for clone CS1-183.

[0639] SEQ ID NO: 599 is the determined cDNA sequence for clone CS1-184.

[0640] SEQ ID NO: 600 is the determined cDNA sequence for clone CS1-187.

[0641] SEQ ID NO: 601 is the determined cDNA sequence for clone CS1-190.

[0642] SEQ ID NO: 602 is the determined cDNA sequence for clone CS1-194.

[0643] SEQ ID NO: 603 is the determined cDNA sequence for clone CS1-195.

[0644] SEQ ID NO: 604 is the determined cDNA sequence for clone CS1-196.

[0645] SEQ ID NO: 605 is the determined cDNA sequence for clone CS1-197.

[0646] SEQ ID NO: 606 is the determined cDNA sequence for clone CS1-200.

[0647] SEQ ID NO: 607 is the determined cDNA sequence for clone CS1-206.

[0648] SEQ ID NO: 608 is the determined cDNA sequence for clone CS1-207.

[0649] SEQ ID NO: 609 is the determined cDNA sequence for clone CS1-234.

[0650] SEQ ID NO: 610 is the determined cDNA sequence for clone CS1-238.

[0651] SEQ ID NO: 611 is the determined cDNA sequence for clone CS1-239.

[0652] SEQ ID NO: 612 is the determined cDNA sequence for clone CS1-243.

[0653] SEQ ID NO: 613 is the determined cDNA sequence for clone CS1-246.

[0654] SEQ ID NO: 614 is the determined cDNA sequence for clone CS1-249.

[0655] SEQ ID NO: 615 is the determined cDNA sequence for clone CS1-250.

[0656] SEQ ID NO: 616 is the determined cDNA sequence for clone CS1-252.

[0657] SEQ ID NO: 617 is the determined cDNA sequence for clone CT502.

[0658] SEQ ID NO: 618 is the determined cDNA sequence for clone CT507.

[0659] SEQ ID NO: 619 is the determined cDNA sequence for clone CT521.

[0660] SEQ ID NO: 620 is the determined cDNA sequence for clone CT544.

[0661] SEQ ID NO: 621 is the determined cDNA sequence for clone CT577.

[0662] SEQ ID NO: 622 is the determined cDNA sequence for clone CT580.

[0663] SEQ ID NO: 623 is the determined cDNA sequence for clone CT594 (also referred to by clone ID 27540).

[0664] SEQ ID NO: 624 is the determined cDNA sequence for clone CT606.

[0665] SEQ ID NO: 625 is the determined cDNA sequence for clone CT607.

[0666] SEQ ID NO: 626 is the determined cDNA sequence for clone CT599.

[0667] SEQ ID NO: 627 is the determined cDNA sequence for clone CT632.

[0668] SEQ ID NO: 628 is the determined cDNA sequence for clone 35691.

[0669] SEQ ID NO: 629 is the determined cDNA sequence for clone 35707.

[0670] SEQ ID NO: 630 is the determined cDNA sequence for clone CSE-2.

[0671] SEQ ID NO: 631 is the amino acid sequence for clone CSE-2.

[0672] SEQ ID NO: 632 is the determined cDNA sequence for clone CT2-3 .

[0673] SEQ ID NO: 633 is the determined cDNA sequence for clone CT2-6.

[0674] SEQ ID NO: 634 is the determined cDNA sequence for clone CT2-8 which shows similarity to SEQ ID NOs: 1112and 1116.

[0675] SEQ ID NO: 635 is the determined cDNA sequence for clone CT2-9.

[0676] SEQ ID NO: 636 is the determined cDNA sequence for clone CT2-12.

[0677] SEQ ID NO: 637 is the determined cDNA sequence for clone CT2-15.

[0678] SEQ ID NO: 638 is the determined cDNA sequence for clone CT2-16.

[0679] SEQ ID NO: 639 is the determined cDNA sequence for clone CT2-17.

[0680] SEQ ID NO: 640 is the determined cDNA sequence for clone CT2-19.

[0681] SEQ ID NO: 641 is the determined cDNA sequence for clone CT2-23.

[0682] SEQ ID NO: 642 is the determined cDNA sequence for clone CT2-25.

[0683] SEQ ID NO: 643 is the determined cDNA sequence for clone CT2-27.

[0684] SEQ ID NO: 644 is the determined cDNA sequence for clone CT2-35.

[0685] SEQ ID NO: 645 is the determined cDNA sequence for clone CT2-39.

[0686] SEQ ID NO: 646 is the determined cDNA sequence for clone CT2-41.

[0687] SEQ ID NO: 647 is the determined cDNA sequence for clone CT2-43.

[0688] SEQ ID NO: 648 is the determined cDNA sequence for clone CT2-44.

[0689] SEQ ID NO: 649 is the determined cDNA sequence for clone CT2-53.

[0690] SEQ ID NO: 650 is the determined cDNA sequence for clone CT2-54.

[0691] SEQ ID NO: 651 is the determined cDNA sequence for clone CT2-55.

[0692] SEQ ID NO: 652 is the determined cDNA sequence for clone CT2-57.

[0693] SEQ ID NO: 653 is the determined cDNA sequence for clone CT2-60.

[0694] SEQ ID NO: 654 is the determined cDNA sequence for clone CT2-64.

[0695] SEQ ID NO: 655 is the determined cDNA sequence for clone CT2-67.

[0696] SEQ ID NO: 656 is the determined cDNA sequence for clone CT2-68.

[0697] SEQ ID NO: 657 is the determined cDNA sequence for clone CT2-75.

[0698] SEQ ID NO: 658 is the determined cDNA sequence for clone CT2-79.

[0699] SEQ ID NO: 659 is the determined cDNA sequence for clone CT2-109.

[0700] SEQ ID NO, 660 is the determined cDNA sequence for clone CT2-112.

[0701] SEQ ID NO: 661 is the determined cDNA sequence for clone CT2-127.

[0702] SEQ ID NO: 662 is the determined cDNA sequence for clone CT2-129.

[0703] SEQ ID NO: 663 is the determined cDNA sequence for clone CT2-156.

[0704] SEQ ID NO: 664 is the determined cDNA sequence for clone CT2-162.

[0705] SEQ ID NO: 665 is the determined cDNA sequence for clone CT2-167.

[0706] SEQ ID NO: 666 is the determined cDNA sequence for clone CT2-169.

[0707] SEQ ID NO: 667 is the determined cDNA sequence for clone CT2-172.

[0708] SEQ ID NO: 668 is the determined cDNA sequence for clone CT2-173.

[0709] SEQ ID NO: 669 is the determined cDNA sequence for clone CT2-174.

[0710] SEQ ID NO: 670 is the determined cDNA sequence for clone CT2-177.

[0711] SEQ ID NO: 671 is the determined cDNA sequence for clone CT2-181.

[0712] SEQ ID NO: 672 is the determined cDNA sequence for clone CT2-191.

[0713] SEQ ID NO: 673 is the determined cDNA sequence for clone CT2-192.

[0714] SEQ ID NO: 674 is the determined cDNA sequence for clone CT2-207.

[0715] SEQ ID NO: 675 is the determined cDNA sequence for clone CT2-222.

[0716] SEQ ID NO: 676 is the determined cDNA sequence for clone CT2-223.

[0717] SEQ ID NO: 677 is the determined cDNA sequence for clone CT2-233.

[0718] SEQ ID NO: 678 is the determined cDNA sequence for clone CT2-244.

[0719] SEQ ID NO: 679 is the determined cDNA sequence for clone CT2-257.

[0720] SEQ ID NO: 680 is the determined cDNA sequence for clone CT2-279.

[0721] SEQ ID NO: 681 is the determined cDNA sequence for clone CT2-288.

[0722] SEQ ID NO: 682 is the determined cDNA sequence for clone CT2-291.

[0723] SEQ ID NO: 683 is the full-length cDNA sequence for human PAC (SEQ ID NOs: 18 and 19).

[0724] SEQ ID NO: 684 is the full-length cDNA sequence for murine homologue of human PAC (SEQ ID NO: 683).

[0725] SEQ ID NO: 685 is the predicted amino acid sequence for the clone of SEQ ID NO: 683.

[0726] SEQ ID NO: 686 is a longer determined cDNA sequence for clone CoSub-19 (SEQ ID NO: 138).

[0727] SEQ ID NO: 687 is the predicted amino acid sequence for the clone of SEQ ID NO: 686.

[0728] SEQ ID NO: 688 is the nucleotide sequence of the M13 forward primer.

[0729] SEQ ID NO: 689 is the nucleotide sequence of the M13 reverse primer.

[0730] SEQ ID NO: 690 is a longer determined cDNA sequence for C799P (SEQ ID NO: 40), showing homology to homo sapiens NADH/NADPH thyroid oxidase p138-tox mRNA.

[0731] SEQ ID NO: 691 is a longer determined cDNA sequence for C794P (SEQ ID NO: 41).

[0732] SEQ ID NO: 692 is the predicted amino acid sequence for the clone of SEQ ID NO: 690.

[0733] SEQ ID NO: 693 is the predicted amino acid sequence for the clone of SEQ ID NO: 691.

[0734] SEQ ID NO: 694 is the determined cDNA sequence for clone R0093:A03.

[0735] SEQ ID NO: 695 is the determined cDNA sequence for clone R0093:A10.

[0736] SEQ ID NO: 696 is the determined cDNA sequence for clone R0093:A11.

[0737] SEQ ID NO: 697 is the determined cDNA sequence for clone R0093:A12.

[0738] SEQ ID NO: 698 is the determined cDNA sequence for clone R0093:B03.

[0739] SEQ ID NO: 699 is the determined cDNA sequence for clone R0093:B04.

[0740] SEQ ID NO: 700 is the determined cDNA sequence for clone R0093:B09.

[0741] SEQ ID NO: 701 is the determined cDNA sequence for clone R0093:B10.

[0742] SEQ ID NO: 702 is the determined cDNA sequence for clone R0093:B11.

[0743] SEQ ID NO: 703 is the determined cDNA sequence for clone R0093:B12.

[0744] SEQ ID NO: 704 is the determined cDNA sequence for clone R0093:C01.

[0745] SEQ ID NO: 705 is the determined cDNA sequence for clone R0093:C03.

[0746] SEQ ID NO: 706 is the determined cDNA sequence for clone R0093:C04.

[0747] SEQ ID NO: 707 is the determined cDNA sequence for clone R0093:C06.

[0748] SEQ ID NO: 708 is the determined cDNA sequence for clone R0093:C08.

[0749] SEQ ID NO: 709 is the determined cDNA sequence for clone R0093:C09.

[0750] SEQ ID NO: 710 is the determined cDNA sequence for clone R0093:C10.

[0751] SEQ ID NO: 711 is the determined cDNA sequence for clone R0093:C11.

[0752] SEQ ID NO: 712 is the determined cDNA sequence for clone R0093:C12.

[0753] SEQ ID NO: 713 is the determined cDNA sequence for clone R0093:D01.

[0754] SEQ ID NO: 714 is the determined cDNA sequence for clone R0093:D02.

[0755] SEQ ID NO: 715 is the determined cDNA sequence for clone R0093:D03.

[0756] SEQ ID NO: 716 is the determined cDNA sequence for clone R0093:D04.

[0757] SEQ ID NO: 717 is the determined cDNA sequence for clone R0093:D05.

[0758] SEQ ID NO: 718 is the determined cDNA sequence for clone R0093:D06.

[0759] SEQ ID NO: 719 is the determined cDNA sequence for clone R0093:D07.

[0760] SEQ ID NO: 720 is the determined cDNA sequence for clone R0093:D08.

[0761] SEQ ID NO: 721 is the determined cDNA sequence for clone R0093:D10.

[0762] SEQ ID NO: 722 is the determined cDNA sequence for clone R0093:D11.

[0763] SEQ ID NO: 723 is the determined cDNA sequence for clone R0093:E02.

[0764] SEQ ID NO: 724 is the determined cDNA sequence for clone R0093:E03.

[0765] SEQ ID NO: 725 is the determined cDNA sequence for clone R0093:E04.

[0766] SEQ ID NO: 726 is the determined cDNA sequence for clone R0093:E06.

[0767] SEQ ID NO: 727 is the determined cDNA sequence for clone R0093:E07.

[0768] SEQ ID NO: 728 is the determined cDNA sequence for clone R0093:E08.

[0769] SEQ ID NO: 729 is the determined cDNA sequence for clone R0093:E09.

[0770] SEQ ID NO: 730 is the determined cDNA sequence for clone R0093:E10.

[0771] SEQ ID NO: 731 is the determined cDNA sequence for clone R0093:E11.

[0772] SEQ ID NO: 732 is the determined cDNA sequence for clone R0093:F02.

[0773] SEQ ID NO: 733 is the determined cDNA sequence for clone R0093:F03.

[0774] SEQ ID NO: 734 is the determined cDNA sequence for clone R0093:F04.

[0775] SEQ ID NO: 735 is the determined cDNA sequence for clone R0093:F05.

[0776] SEQ ID NO: 736 is the determined cDNA sequence for clone R0093:F06.

[0777] SEQ ID NO: 737 is the determined cDNA sequence for clone R0093:F08.

[0778] SEQ ID NO: 738 is the determined cDNA sequence for clone R0093:F09.

[0779] SEQ ID NO: 739 is the determined cDNA sequence for clone R0093:F10.

[0780] SEQ ID NO: 740 is the determined cDNA sequence for clone R0093:F12.

[0781] SEQ ID NO: 741 is the determined cDNA sequence for clone R0093:G01.

[0782] SEQ ID NO: 742 is the determined cDNA sequence for clone R0093:G03.

[0783] SEQ ID NO: 743 is the determined cDNA sequence for clone R0093:G04.

[0784] SEQ ID NO: 744 is the determined cDNA sequence for clone R0093:G06.

[0785] SEQ ID NO: 745 is the determined cDNA sequence for clone R0093:G07.

[0786] SEQ ID NO: 746 is the determined cDNA sequence for clone R0093:G08.

[0787] SEQ ID NO: 747 is the determined cDNA sequence for clone R0093:G09.

[0788] SEQ ID NO: 748 is the determined cDNA sequence for clone R0093:G10.

[0789] SEQ ID NO: 749 is the determined cDNA sequence for clone R0093:G11.

[0790] SEQ ID NO: 750 is the determined cDNA sequence for clone R0093:G12.

[0791] SEQ ID NO: 751 is the determined cDNA sequence for clone R0093:H02.

[0792] SEQ ID NO: 752 is the determined cDNA sequence for clone R0093:H03.

[0793] SEQ ID NO: 753 is the determined cDNA sequence for clone R0093:H04.

[0794] SEQ ID NO: 754 is the determined cDNA sequence for clone R0093:H05.

[0795] SEQ ID NO: 755 is the determined cDNA sequence for clone R0093:H07.

[0796] SEQ ID NO: 756 is the determined cDNA sequence for clone R0093:H08.

[0797] SEQ ID NO: 757 is the determined cDNA sequence for clone R0093:H09.

[0798] SEQ ID NO: 758 is the determined cDNA sequence for clone R0093:H10.

[0799] SEQ ID NO: 759 is the determined cDNA sequence for clone R0093:H11.

[0800] SEQ ID NO: 760 is the determined cDNA sequence for clone R0094:A03.

[0801] SEQ ID NO: 761 is the determined cDNA sequence for clone R0094:A05.

[0802] SEQ ID NO: 762 is the determined cDNA sequence for clone R0094:A06.

[0803] SEQ ID NO: 763 is the determined cDNA sequence for clone R0094:A07.

[0804] SEQ ID NO: 764 is the determined cDNA sequence for clone R0094:A09.

[0805] SEQ ID NO: 765 is the determined cDNA sequence for clone R0094:A10.

[0806] SEQ ID NO: 766 is the determined cDNA sequence for clone R0094:A12.

[0807] SEQ ID NO: 767 is the determined cDNA sequence for clone R0094:B03.

[0808] SEQ ID NO: 768 is the determined cDNA sequence for clone R0094:B06.

[0809] SEQ ID NO: 769 is the determined cDNA sequence for clone R0094:B08.

[0810] SEQ ID NO: 770 is the determined cDNA sequence for clone R0094:B11.

[0811] SEQ ID NO: 771 is the determined cDNA sequence for clone R0094:B12.

[0812] SEQ ID NO: 772 is the determined cDNA sequence for clone R0094:C01.

[0813] SEQ ID NO: 773 is the determined cDNA sequence for clone R0094:C02.

[0814] SEQ ID NO: 774 is the determined cDNA sequence for clone R0094:C03.

[0815] SEQ ID NO: 775 is the determined cDNA sequence for clone R0094:C05.

[0816] SEQ ID NO: 776 is the determined cDNA sequence for clone R0094:C06.

[0817] SEQ ID NO: 777 is the determined cDNA sequence for clone R0094:C08.

[0818] SEQ ID NO: 778 is the determined cDNA sequence for clone R0094:C09.

[0819] SEQ ID NO: 779 is the determined cDNA sequence for clone R0094:C10.

[0820] SEQ ID NO: 780 is the determined cDNA sequence for clone R0094:C11.

[0821] SEQ ID NO: 781 is the determined cDNA sequence for clone R0094:C12.

[0822] SEQ ID NO: 782 is the determined cDNA sequence for clone R0094:C01.

[0823] SEQ ID NO: 783 is the determined cDNA sequence for clone R0094:D02.

[0824] SEQ ID NO: 784 is the determined cDNA sequence for clone R0094:D03.

[0825] SEQ ID NO: 785 is the determined cDNA sequence for clone R0094:D04.

[0826] SEQ ID NO: 786 is the determined cDNA sequence for clone R0094:D05.

[0827] SEQ ID NO: 787 is the determined cDNA sequence for clone R0094:D07.

[0828] SEQ ID NO: 788 is the determined cDNA sequence for clone R0094:D08.

[0829] SEQ ID NO: 789 is the determined cDNA sequence for clone R0094:D09.

[0830] SEQ ID NO: 790 is the determined cDNA sequence for clone R0094:D10.

[0831] SEQ ID NO: 791 is the determined cDNA sequence for clone R0094:D12.

[0832] SEQ ID NO: 792 is the determined cDNA sequence for clone R0094:E01.

[0833] SEQ ID NO: 793 is the determined cDNA sequence for clone R0094:E02.

[0834] SEQ ID NO: 794 is the determined cDNA sequence for clone R0094:E03.

[0835] SEQ ID NO: 795 is the determined cDNA sequence for clone R0094:E05.

[0836] SEQ ID NO: 796 is the determined cDNA sequence for clone R0094:E06.

[0837] SEQ ID NO: 797 is the determined cDNA sequence for clone R0094:E07.

[0838] SEQ ID NO: 798 is the determined cDNA sequence for clone R0094:E08.

[0839] SEQ ID NO: 799 is the determined cDNA sequence for clone R0094:E09.

[0840] SEQ ID NO: 800 is the determined cDNA sequence for clone R0094:E10.

[0841] SEQ ID NO: 801 is the determined cDNA sequence for clone R0094:E11.

[0842] SEQ ID NO: 802 is the determined cDNA sequence for clone R0094:E12.

[0843] SEQ ID NO: 803 is the determined cDNA sequence for clone R0094:F01.

[0844] SEQ ID NO: 804 is the determined cDNA sequence for clone R0094:F03.

[0845] SEQ ID NO: 805 is the determined cDNA sequence for clone R0094:F05.

[0846] SEQ ID NO: 806 is the determined cDNA sequence for clone R0094:F06.

[0847] SEQ ID NO: 807 is the determined cDNA sequence for clone R0094:F07.

[0848] SEQ ID NO: 808 is the determined cDNA sequence for clone R0094:F08.

[0849] SEQ ID NO: 809 is the determined cDNA sequence for clone R0094:F09.

[0850] SEQ ID NO: 810 is the determined cDNA sequence for clone R0094:F10.

[0851] SEQ ID NO: 811 is the determined cDNA sequence for clone R0094:F11.

[0852] SEQ ID NO: 812 is the determined cDNA sequence for clone R0094:F12.

[0853] SEQ ID NO: 813 is the determined cDNA sequence for clone R0094:G02.

[0854] SEQ ID NO: 814 is the determined cDNA sequence for clone R0094:G03.

[0855] SEQ ID NO: 815 is the determined cDNA sequence for clone R0094:G04.

[0856] SEQ ID NO: 816 is the determined cDNA sequence for clone R0094:G06.

[0857] SEQ ID NO: 817 is the determined cDNA sequence for clone R0094:G07.

[0858] SEQ ID NO: 818 is the determined cDNA sequence for clone R0094:G08.

[0859] SEQ ID NO: 819 is the determined cDNA sequence for clone R0094:G10.

[0860] SEQ ID NO: 820 is the determined cDNA sequence for clone R0094:G11.

[0861] SEQ ID NO: 821 is the determined cDNA sequence for clone R0094:G12.

[0862] SEQ ID NO: 822 is the determined cDNA sequence for clone R0094:H01.

[0863] SEQ ID NO: 823 is the determined cDNA sequence for clone R0094:H03.

[0864] SEQ ID NO: 824 is the determined cDNA sequence for clone R0094:H04.

[0865] SEQ ID NO: 825 is the determined cDNA sequence for clone R0094:H05.

[0866] SEQ ID NO: 826 is the determined cDNA sequence for clone R0094:H06.

[0867] SEQ ID NO: 827 is the determined cDNA sequence for clone R0094:H08.

[0868] SEQ ID NO: 828 is the determined cDNA sequence for clone R0094:H09.

[0869] SEQ ID NO: 829 is the determined cDNA sequence for clone R0094:H10.

[0870] SEQ ID NO: 830 is the determined cDNA sequence for clone R0094:H11.

[0871] SEQ ID NO: 831 is the determined cDNA sequence for clone R0095:A03.

[0872] SEQ ID NO: 832 is the determined cDNA sequence for clone R0095:A06.

[0873] SEQ ID NO: 833 is the determined cDNA sequence for clone R0095:A07.

[0874] SEQ ID NO: 834 is the determined cDNA sequence for clone R0095:B01.

[0875] SEQ ID NO: 835 is the determined cDNA sequence for clone R0095:B02.

[0876] SEQ ID NO: 836 is the determined cDNA sequence for clone R0095:B03.

[0877] SEQ ID NO: 837 is the determined cDNA sequence for clone R0095:B04.

[0878] SEQ ID NO: 838 is the determined cDNA sequence for clone R0095:B05.

[0879] SEQ ID NO: 839 is the determined cDNA sequence for clone R0095:B06.

[0880] SEQ ID NO: 840 is the determined cDNA sequence for clone R0095:B10.

[0881] SEQ ID NO: 841 is the determined cDNA sequence for clone R0095:B11.

[0882] SEQ ID NO: 842 is the determined cDNA sequence for clone R0095:B12.

[0883] SEQ ID NO: 843 is the determined cDNA sequence for clone R0095:C01.

[0884] SEQ ID NO: 844 is the determined cDNA sequence for clone R0095:C03.

[0885] SEQ ID NO: 845 is the determined cDNA sequence for clone R0095:C04.

[0886] SEQ ID NO: 846 is the determined cDNA sequence for clone R0095:C05.

[0887] SEQ ID NO: 847 is the determined cDNA sequence for clone R0095:C06.

[0888] SEQ ID NO: 848 is the determined cDNA sequence for clone R0095:C07.

[0889] SEQ ID NO: 849 is the determined cDNA sequence for clone R0095:C08.

[0890] SEQ ID NO: 850 is the determined cDNA sequence for clone R0095:C10.

[0891] SEQ ID NO: 851 is the determined cDNA sequence for clone R0095:C12.

[0892] SEQ ID NO: 852 is the determined cDNA sequence for clone R0095:D01.

[0893] SEQ ID NO: 853 is the determined cDNA sequence for clone R0095:D03.

[0894] SEQ ID NO: 854 is the determined cDNA sequence for clone R0095:D04.

[0895] SEQ ID NO: 855 is the determined cDNA sequence for clone R0095:D06.

[0896] SEQ ID NO: 856 is the determined cDNA sequence for clone R0095:D07.

[0897] SEQ ID NO: 857 is the determined cDNA sequence for clone R0095:D08.

[0898] SEQ ID NO: 858 is the determined cDNA sequence for clone R0095:D09.

[0899] SEQ ID NO: 859 is the determined cDNA sequence for clone R0095:D11.

[0900] SEQ ID NO: 860 is the determined cDNA sequence for clone R0095:D12.

[0901] SEQ ID NO: 861 is the determined cDNA sequence for clone R0095:E01.

[0902] SEQ ID NO: 862 is the determined cDNA sequence for clone R0095:E02.

[0903] SEQ ID NO: 863 is the determined cDNA sequence for clone R0095:E04.

[0904] SEQ ID NO: 864 is the determined cDNA sequence for clone R0095:E05.

[0905] SEQ ID NO: 865 is the determined cDNA sequence for clone R0095:E06.

[0906] SEQ ID NO: 866 is the determined cDNA sequence for clone R0095:E07.

[0907] SEQ ID NO: 867 is the determined cDNA sequence for clone R0095:E08.

[0908] SEQ ID NO: 868 is the determined cDNA sequence for clone R0095:E11.

[0909] SEQ ID NO: 869 is the determined cDNA sequence for clone R0095:E12.

[0910] SEQ ID NO: 870 is the determined cDNA sequence for clone R0095:F01.

[0911] SEQ ID NO: 871 is the determined cDNA sequence for clone R0095:F03.

[0912] SEQ ID NO: 872 is the determined cDNA sequence for clone R0095:F06.

[0913] SEQ ID NO: 873 is the determined cDNA sequence for clone R0095:F10.

[0914] SEQ ID NO: 874 is the determined cDNA sequence for clone R0095:F11.

[0915] SEQ ID NO: 875 is the determined cDNA sequence for clone R0095:G02.

[0916] SEQ ID NO: 876 is the determined cDNA sequence for clone R0095:G03.

[0917] SEQ ID NO: 877 is the determined cDNA sequence for clone R0095:G04.

[0918] SEQ ID NO: 878 is the determined cDNA sequence for clone R0095:G08.

[0919] SEQ ID NO: 879 is the determined cDNA sequence for clone R0095:G09.

[0920] SEQ ID NO: 880 is the determined cDNA sequence for clone R0095:G10.

[0921] SEQ ID NO: 881 is the determined cDNA sequence for clone R0095:H01.

[0922] SEQ ID NO: 882 is the determined cDNA sequence for clone R0095:H02.

[0923] SEQ ID NO: 883 is the determined cDNA sequence for clone R0095:H14.

[0924] SEQ ID NO: 884 is the determined cDNA sequence for clone R0095:H06.

[0925] SEQ ID NO: 885 is the determined cDNA sequence for clone R0095:H07.

[0926] SEQ ID NO: 886 is the determined cDNA sequence for clone R0095:H09.

[0927] SEQ ID NO: 887 is the determined cDNA sequence for clone R0096:A02.

[0928] SEQ ID NO: 888 is the determined cDNA sequence for clone R0096:A08.

[0929] SEQ ID NO: 889 is the determined cDNA sequence for clone R0096:A09.

[0930] SEQ ID NO: 890 is the determined cDNA sequence for clone R0096:A10.

[0931] SEQ ID NO: 891 is the determined cDNA sequence for clone R0096:A11.

[0932] SEQ ID NO: 892 is the determined cDNA sequence for clone R0096:A12.

[0933] SEQ ID NO: 893 is the determined cDNA sequence for clone R0096:B02.

[0934] SEQ ID NO: 894 is the determined cDNA sequence for clone R0096:B03.

[0935] SEQ ID NO: 895 is the determined cDNA sequence for clone R0096:B04.

[0936] SEQ ID NO: 896 is the determined cDNA sequence for clone R0096:B05.

[0937] SEQ ID NO: 897 is the determined cDNA sequence for clone R0096:B06.

[0938] SEQ ID NO: 898 is the determined cDNA sequence for clone R0096:B07.

[0939] SEQ ID NO: 899 is the determined cDNA sequence for clone R0096:B08.

[0940] SEQ ID NO: 900 is the determined cDNA sequence for clone R0096:B09.

[0941] SEQ ID NO: 901 is the determined cDNA sequence for clone R0096:B10.

[0942] SEQ ID NO: 902 is the determined cDNA sequence for clone R0096:B11.

[0943] SEQ ID NO: 903 is the determined cDNA sequence for clone R0096:B12.

[0944] SEQ ID NO: 904 is the determined cDNA sequence for clone R0096:C01.

[0945] SEQ ID NO: 905 is the determined cDNA sequence for clone R0096:C03.

[0946] SEQ ID NO: 906 is the determined cDNA sequence for clone R0096:C04.

[0947] SEQ ID NO: 907 is the determined cDNA sequence for clone R0096:C05.

[0948] SEQ ID NO: 908 is the determined cDNA sequence for clone R0096:C06.

[0949] SEQ ID NO: 909 is the determined cDNA sequence for clone R0096:C07.

[0950] SEQ ID NO: 910 is the determined cDNA sequence for clone R0096:C08.

[0951] SEQ ID NO: 911 is the determined cDNA sequence for clone R0096:C09.

[0952] SEQ ID NO: 912 is the determined cDNA sequence for clone R0096:C10.

[0953] SEQ ID NO: 913 is the determined cDNA sequence for clone R0096:C11.

[0954] SEQ ID NO: 914 is the determined cDNA sequence for clone R0096:C12.

[0955] SEQ ID NO: 915 is the determined cDNA sequence for clone R0096:D01.

[0956] SEQ ID NO: 916 is the determined cDNA sequence for clone R0096:D02.

[0957] SEQ ID NO: 917 is the determined cDNA sequence for clone R0096:D03.

[0958] SEQ ID NO: 918 is the determined cDNA sequence for clone R0096:D04.

[0959] SEQ ID NO: 919 is the determined cDNA sequence for clone R0096:D05.

[0960] SEQ ID NO: 920 is the determined cDNA sequence for clone R0096:D08.

[0961] SEQ ID NO: 921 is the determined cDNA sequence for clone R0096:D09.

[0962] SEQ ID NO: 922 is the determined cDNA sequence for clone R0096:D10.

[0963] SEQ ID NO: 923 is the determined cDNA sequence for clone R0096:D12.

[0964] SEQ ID NO: 924 is the determined cDNA sequence for clone R0096:E01.

[0965] SEQ ID NO: 925 is the determined cDNA sequence for clone R0096:E02.

[0966] SEQ ID NO: 926 is the determined cDNA sequence for clone R0096:E03.

[0967] SEQ ID NO: 927 is the determined cDNA sequence for clone R0096:E04.

[0968] SEQ ID NO: 928 is the determined cDNA sequence for clone R0096:E05.

[0969] SEQ ID NO: 929 is the determined cDNA sequence for clone R0096:E06.

[0970] SEQ ID NO: 930 is the determined cDNA sequence for clone R0096:E08.

[0971] SEQ ID NO: 931 is the determined cDNA sequence for clone R0096:E09.

[0972] SEQ ID NO: 932 is the determined cDNA sequence for clone R0096:E10.

[0973] SEQ ID NO: 933 is the determined cDNA sequence for clone R0096:E11.

[0974] SEQ ID NO: 934 is the determined cDNA sequence for clone R0096:F12.

[0975] SEQ ID NO: 935 is the determined cDNA sequence for clone R0096:F01.

[0976] SEQ ID NO: 936 is the determined cDNA sequence for clone R0096:F02.

[0977] SEQ ID NO: 937 is the determined cDNA sequence for clone R0096:F03.

[0978] SEQ ID NO: 938 is the determined cDNA sequence for clone R0096:F04.

[0979] SEQ ID NO: 939 is the determined cDNA sequence for clone R0096:F05.

[0980] SEQ ID NO: 940 is the determined cDNA sequence for clone R0096:F07.

[0981] SEQ ID NO: 941 is the determined cDNA sequence for clone R0096:F10.

[0982] SEQ ID NO: 942 is the determined cDNA sequence for clone R0096:F11.

[0983] SEQ ID NO: 943 is the determined cDNA sequence for clone R0096:G01.

[0984] SEQ ID NO: 944 is the determined cDNA sequence for clone R0096:G03.

[0985] SEQ ID NO: 945 is the determined cDNA sequence for clone R0096:G04.

[0986] SEQ ID NO: 946 is the determined cDNA sequence for clone R0096:G05.

[0987] SEQ ID NO: 947 is the determined cDNA sequence for clone R0096:G06.

[0988] SEQ ID NO: 948 is the determined cDNA sequence for clone R0096:G07.

[0989] SEQ ID NO: 949 is the determined cDNA sequence for clone R0096:G09.

[0990] SEQ ID NO: 950 is the determined cDNA sequence for clone R0096:G10.

[0991] SEQ ID NO: 951 is the determined cDNA sequence for clone R0096:G12.

[0992] SEQ ID NO: 952 is the determined cDNA sequence for clone R0096:H01.

[0993] SEQ ID NO: 953 is the determined cDNA sequence for clone R0096:H02.

[0994] SEQ ID NO: 954 is the determined cDNA sequence for clone R0096:H03.

[0995] SEQ ID NO: 955 is the determined cDNA sequence for clone R0096:H07.

[0996] SEQ ID NO: 956 is the determined cDNA sequence for clone R0096:H08.

[0997] SEQ ID NO: 957 is the determined cDNA sequence for clone R0097:A05

[0998] SEQ ID NO: 958 is the determined cDNA sequence for clone R0097:A06.

[0999] SEQ ID NO: 959 is the determined cDNA sequence for clone R0097:A10.

[1000] SEQ ID NO: 960 is the determined cDNA sequence for clone R0097:A11.

[1001] SEQ ID NO: 961 is the determined cDNA sequence for clone R0097:B01.

[1002] SEQ ID NO: 962 is the determined cDNA sequence for clone R0097:B03.

[1003] SEQ ID NO: 963 is the determined cDNA sequence for clone R0097:B04.

[1004] SEQ ID NO: 964 is the determined cDNA sequence for clone R0097:B05.

[1005] SEQ ID NO: 965 is the determined cDNA sequence for clone R0097:B06.

[1006] SEQ ID NO: 966 is the determined cDNA sequence for clone R0097:B07.

[1007] SEQ ID NO: 967 is the determined cDNA sequence for clone R0097:B11.

[1008] SEQ ID NO: 968 is the determined cDNA sequence for clone R0097:C01.

[1009] SEQ ID NO: 969 is the determined cDNA sequence for clone R0097:C02.

[1010] SEQ ID NO: 970 is the determined cDNA sequence for clone R0097:C03.

[1011] SEQ ID NO: 971 is the determined cDNA sequence for clone R0097:C04.

[1012] SEQ ID NO: 972 is the determined cDNA sequence for clone R0097:C05.

[1013] SEQ ID NO: 973 is the determined cDNA sequence for clone R0097:C07.

[1014] SEQ ID NO: 974 is the determined cDNA sequence for clone R0097:C08.

[1015] SEQ ID NO: 975 is the determined cDNA sequence for clone R0097:C09.

[1016] SEQ ID NO: 976 is the determined cDNA sequence for clone R0097:C10.

[1017] SEQ ID NO: 977 is the determined cDNA sequence for clone R0097:D10.

[1018] SEQ ID NO: 978 is the determined cDNA sequence for clone R0097:D08.

[1019] SEQ ID NO: 979 is the determined cDNA sequence for clone R0097:E02.

[1020] SEQ ID NO: 980 is the determined cDNA sequence for clone R0097:E09.

[1021] SEQ ID NO: 981 is the determined cDNA sequence for clone R0097:E11.

[1022] SEQ ID NO: 982 is the determined cDNA sequence for clone R0097:F01.

[1023] SEQ ID NO: 983 is the determined cDNA sequence for clone R0097:F11.

[1024] SEQ ID NO: 984 is the determined cDNA sequence for clone R0097:G01.

[1025] SEQ ID NO: 985 is the determined cDNA sequence for clone R0097:G11.

[1026] SEQ ID NO: 986 is the determined cDNA sequence for clone R0097:G12.

[1027] SEQ ID NO: 987 is the determined cDNA sequence for clone R0097:H01.

[1028] SEQ ID NO: 988 is the determined cDNA sequence for clone R0097:H02.

[1029] SEQ ID NO: 989 is the determined cDNA sequence for clone R0097:H04.

[1030] SEQ ID NO: 990 is the determined cDNA sequence for clone R0097:H06.

[1031] SEQ ID NO: 991 is the determined cDNA sequence for clone R0097:H07.

[1032] SEQ ID NO: 992 is the determined cDNA sequence for clone R0097:H09.

[1033] SEQ ID NO: 993 is the determined cDNA sequence for clone R0097:H11.

[1034] SEQ ID NO: 994 is the determined cDNA sequence for clone R0098:A03.

[1035] SEQ ID NO: 995 is the determined cDNA sequence for clone R0098:A05.

[1036] SEQ ID NO: 996 is the determined cDNA sequence for clone R0098:A06.

[1037] SEQ ID NO: 997 is the determined cDNA sequence for clone R0098:A10.

[1038] SEQ ID NO: 998 is the determined cDNA sequence for clone R0098:A12.

[1039] SEQ ID NO: 999 is the determined cDNA sequence for clone R0098:B01.

[1040] SEQ ID NO: 1000 is the determined cDNA sequence for clone R0098:B02.

[1041] SEQ ID NO: 1001 is the determined cDNA sequence for clone R0098:B05.

[1042] SEQ ID NO: 1002 is the determined cDNA sequence for clone R0098:B06.

[1043] SEQ ID NO: 1003 is the determined cDNA sequence for clone R0098:B10.

[1044] SEQ ID NO: 1004 is the determined cDNA sequence for clone R0098:C03.

[1045] SEQ ID NO: 1005 is the determined cDNA sequence for clone R0098:C04.

[1046] SEQ ID NO: 1006 is the determined cDNA sequence for clone R0098:C05.

[1047] SEQ ID NO: 1007 is the determined cDNA sequence for clone R0098:C10.

[1048] SEQ ID NO: 1008 is the determined cDNA sequence for clone R0098:C11.

[1049] SEQ ID NO: 1009 is the determined cDNA sequence for clone R0098:D01.

[1050] SEQ ID NO: 1010 is the determined cDNA sequence for clone R0098:D02.

[1051] SEQ ID NO: 1011 is the determined cDNA sequence for clone R0098:D07.

[1052] SEQ ID NO: 1012 is the determined cDNA sequence for clone R0098:D08.

[1053] SEQ ID NO: 1013 is the determined cDNA sequence for clone R0098:D09.

[1054] SEQ ID NO: 1014 is the determined cDNA sequence for clone R0098:D10.

[1055] SEQ ID NO: 1015 is the determined cDNA sequence for clone R0098:D11.

[1056] SEQ ID NO: 1016 is the determined cDNA sequence for clone R0098:D12.

[1057] SEQ ID NO: 1017 is the determined cDNA sequence for clone R0098:E01.

[1058] SEQ ID NO: 1018 is the determined cDNA sequence for clone R0098:E04.

[1059] SEQ ID NO: 1019 is the determined cDNA sequence for clone R0098:E05.

[1060] SEQ ID NO: 1020 is the determined cDNA sequence for clone R0098:E06.

[1061] SEQ ID NO: 1021 is the determined cDNA sequence for clone R0098:E07.

[1062] SEQ ID NO: 1022 is the determined cDNA sequence for clone R0098:E11.

[1063] SEQ ID NO: 1023 is the determined cDNA sequence for clone R0098:F04.

[1064] SEQ ID NO: 1024 is the determined cDNA sequence for clone R0098:F05.

[1065] SEQ ID NO: 1025 is the determined cDNA sequence for clone R0098:F06.

[1066] SEQ ID NO: 1026 is the determined cDNA sequence for clone R0098:F07.

[1067] SEQ ID NO: 1027 is the determined cDNA sequence for clone R0098:F08.

[1068] SEQ ID NO: 1028 is the determined cDNA sequence for clone R0098:F09.

[1069] SEQ ID NO: 1029 is the determined cDNA sequence for clone R0098:F10.

[1070] SEQ ID NO: 1030 is the determined cDNA sequence for clone R0098:F11.

[1071] SEQ ID NO: 1031 is the determined cDNA sequence for clone R0098:F12.

[1072] SEQ ID NO: 1032 is the determined cDNA sequence for clone R0098:G02.

[1073] SEQ ID NO: 1033 is the determined cDNA sequence for clone R0098:G03.

[1074] SEQ ID NO: 1034 is the determined cDNA sequence for clone R0098:G05.

[1075] SEQ ID NO: 1035 is the determined cDNA sequence for clone R0098:G06.

[1076] SEQ ID NO: 1036 is the determined cDNA sequence for clone R0098:G07.

[1077] SEQ ID NO: 1037 is the determined cDNA sequence for clone R0098:G08.

[1078] SEQ ID NO: 1038 is the determined cDNA sequence for clone R0098:G09.

[1079] SEQ ID NO: 1039 is the determined cDNA sequence for clone R0098:G10.

[1080] SEQ ID NO: 1040 is the determined cDNA sequence for clone R0098:G11.

[1081] SEQ ID NO: 1041 is the determined cDNA sequence for clone R0098:G12.

[1082] SEQ ID NO: 1042 is the determined cDNA sequence for clone R0098:H02.

[1083] SEQ ID NO: 1043 is the determined cDNA sequence for clone R0098:H03.

[1084] SEQ ID NO: 1044 is the determined cDNA sequence for clone R0098:H04.

[1085] SEQ ID NO: 1045 is the determined cDNA sequence for clone R0098:H05.

[1086] SEQ ID NO: 1046 is the determined cDNA sequence for clone R0098:H07.

[1087] SEQ ID NO: 1047 is the determined cDNA sequence for clone R0098:H08.

[1088] SEQ ID NO: 1048 is the determined cDNA sequence for clone R0098:H11.

[1089] SEQ ID NO: 1049 is the determined cDNA sequence for clone C878P which shows sequence similarity to homo sapiens cDNA FLJ10884 fis, clone NT2RP4001950 and homo sapiens cDNA FLJ11111 fis, clone PLACE1005923.

[1090] SEQ ID NO: 1050 is the determined cDNA sequence for clone C882P which shows sequence similarity to homo sapiens cDNA FLJ20116 fis, clone COLO 5655 and homo sapiens cDNA FLJ20740 fis, clone HEP07118.

[1091] SEQ ID NO: 1051 is the determined cDNA sequence for clone C883P which shows sequence similarity to human homeobox protein Cdx2 mRNA.

[1092] SEQ ID NO: 1052 is the determined cDNA sequence for clone C884P which shows sequence similarity to human TM4SF3 (aka, CO-029).

[1093] SEQ ID NO: 1053 is the determined cDNA sequence for clone C886P which shows sequence similarity to human secretory protein (P1.B) mRNA and homo sapiens trefoil factor 3 (intestinal) (TFF3) mRNA.

[1094] SEQ ID NO: 1054 is the determined cDNA sequence for clone C892P which shows sequence similarity to human galectin-4 mRNA.

[1095] SEQ ID NO: 1055 is the determined cDNA sequence for clone C900P which shows sequence similarity to homo sapiens mucin 11 (MUC11) mRNA.

[1096] SEQ ID NO: 1056 is the determined cDNA sequence for clone C902P which shows sequence similarity to homo sapiens calcium-dependent chloride channel-1 (hCLCA1) mRNA.

[1097] SEQ ID NO: 1057 is the determined cDNA sequence for clone C903P which shows sequence similarity to homo sapiens transmembrane mucin 12 (MUC12) mRNA.

[1098] SEQ ID NO: 1058 is the determined cDNA sequence for clone C899P which shows sequence similarity to homo sapiens intestinal mucin (MUC2) mRNA.

[1099] SEQ ID NO: 1059 is the predicted amino acid sequence for the clone of SEQ ID NO: 1049.

[1100] SEQ ID NO: 1060 is the predicted amino acid sequence for the clone of SEQ ID NO: 1050.

[1101] SEQ ID NO: 1061 is the predicted amino acid sequence for the clone of SEQ ID NO: 1051.

[1102] SEQ ID NO: 1062 is the predicted amino acid sequence for the clone of SEQ ID NO: 1052.

[1103] SEQ ID NO: 1063 is the predicted amino acid sequence for the clone of SEQ ID NO: 1053.

[1104] SEQ ID NO: 1064 is the predicted amino acid sequence for the clone of SEQ ID NO: 1054.

[1105] SEQ ID NO: 1065 is the predicted amino acid sequence for the clone of SEQ ID NO: 1055.

[1106] SEQ ID NO: 1066 is the predicted amino acid sequence for the clone of SEQ ID NO: 1056.

[1107] SEQ ID NO: 1067 is the predicted amino acid sequence for the clone of SEQ ID NO: 1057.

[1108] SEQ ID NO: 1068 is the predicted amino acid sequence for the clone of SEQ ID NO: 1058.

[1109] SEQ ID NO: 1069 is the full length nucleotide sequence for clone CS1-152 (C880P, C887P).

[1110] SEQ ID NO: 1070 is the predicted amino acid sequence for the clone of SEQ ID NO: 1069.

[1111] SEQ ID NO: 1071 is the cDNA sequence for human colon specific gene (geneseq X03195) identified from a computer search of the public geneseq database and which shows similarity to clone C880P.

[1112] SEQ ID NO: 1072 is the cDNA sequence for human protein comprising secretory signal nucleotide sequence 3 (geneseq V29035) identified from a computer search of the public geneseq database and which shows similarity to clone C880P.

[1113] SEQ ID NO: 1073 is the cDNA sequence for open reading frame human protein comprising secretory signal 3 (geneseq V29036) identified from a computer search of the public geneseq database and which shows similarity to clone C880P.

[1114] SEQ ID NO: 1074 is the cDNA sequence for human colon specific protein cDNA (geneseq T51784) identified from a computer search of the public geneseq database and which shows similarity to clone C880P.

[1115] SEQ ID NO: 1075 is the cDNA sequence for human Reg 1-gamma protein (geneseq V29156) identified from a computer search of the public geneseq database and which shows similarity to clone C880P.

[1116] SEQ ID NO: 1076 is the cDNA sequence for human intestinal peptide-associated transporter HPT-1 mRNA, complete cds and homo sapiens mRNA for L1-cadherin (geneseq X18166) identified from a computer search of the public geneseq database and which shows similarity to clone C888P.

[1117] SEQ ID NO: 1077 is the amino acid sequence of geneseq record W12691 which shows sequence similarity to clone C880P.

[1118] SEQ ID NO: 1078 is the amino acid sequence of geneseq record W37866 which shows sequence similarity to clone C880P.

[1119] SEQ ID NO: 1079 is the amino acid sequence of geneseq record W37929 which shows sequence similarity to clone C880P.

[1120] SEQ ID NO: 1080 is the amino acid sequence of geneseq record W84274 which shows sequence similarity to clone C880P.

[1121] SEQ ID NO: 1081 is the amino acid sequence of geneseq record W740898 which shows sequence similarity to clone C888P.

[1122] SEQ ID NO: 1082 is the determined cDNA sequence for clone 27540

[1123] SEQ ID NO: 1083 is the predicted amino acid sequence of clone 27540 (SEQ ID NO: 1082).

[1124] SEQ ID NO: 1084 is the determined cDNA sequence for Ra12-C884P-PCRX2.

[1125] SEQ ID NO: 1085 the predicted amino acid sequence for Ra12-C884P (SEQ ID NO: 1084).

[1126] SEQ ID NO: 1086 the determined cDNA sequence for R.C888P.

[1127] SEQ ID NO: 1087 the predicted amino acid sequence for R.C888P (SEQ ID NO: 1086).

[1128] SEQ ID NO: 1088 is the PCR primer 080300-A (Primer Identifier 7839) for amplification of C884.

[1129] SEQ ID NO: 1089 is the PCR primer 080300-B (Primer Identifier 7840) for amplification of C884.

[1130] SEQ ID NO: 1090 is the sense PCR Primer -080300-C (Primer ID7841) for amplification of C888P.

[1131] SEQ ID NO: 1091 is the antisense PCR Primer -080300-D (Primer ID7842) for amplification of C888P.

[1132] SEQ ID NO: 1092 is the determined cDNA sequence for the RECC gene.

[1133] SEQ ID NO: 1093 is the predicted protein sequence encoded by SEQ ID NO: 1092.

[1134] SEQ ID NO. 1094 is the full length C799P/THOX2 cDNA sequence.

[1135] SEQ ID NO: 1095 is the full length C799P/THOX2 amino acid sequence that is the amino acid sequence predicted by the ORF contained in SEQ ID NO: 1094.

[1136] SEQ ID NO: 1096 is the full length cDNA sequence for Galectin-4, which shows similarity to clone CT-53 (C892P).

[1137] SEQ ID NO: 1097 is the full length cDNA sequence for Human SurfaceMarker 1 GPI-anchored, which shows similarity to clone CT-126 (25527).

[1138] SEQ ID NO: 1098 is the full length cDNA sequence for hu.XAG homolog Anterior Gradient Protein, which shows similarity to clone CT-140 (25537).

[1139] SEQ ID NO: 1099 is the full length cDNA sequence for hu glucose phosphate isomerase (GPI), which shows similarity to clone CT-148 (25544).

[1140] SEQ ID NO: 1100 is the determined cDNA sequence for clone CT2-283 (41103).

[1141] SEQ ID NO: 1101 is the full length cDNA sequence for APG-2, which shows similarity to clones CT2-136 (41099) and CT-17 (24115).

[1142] SEQ ID NO: 1102 is the predicted full length protein sequence for APG-2, which shows similarity to clones CT2-136 (41099) and CT-17 (24115).

[1143] SEQ ID NO: 1103 is the full length cDNA sequence for human squalene epoxidase, which shows similarity to clone CS1-104 (31409).

[1144] SEQ ID NO: 1104 is the full length cDNA sequence for human Mad2, which shows similarity to clone CS1-106 (31364).

[1145] SEQ ID NO: 1105 is the full length cDNA sequence for epithelial-specific transcription factor, which shows similarity to clone CS1-123 (31396).

[1146] SEQ ID NO: 1106 is the full length cDNA sequence for KSA, Adenocarcinoma-associated antigen, which shows similarity to clone CS1-160 (32222).

[1147] SEQ ID NO: 1107 is the predicted protein sequence encoded by SEQ ID NO: 1103.

[1148] SEQ ID NO: 1108 is the predicted protein sequence encoded by SEQ ID NO: 1104.

[1149] SEQ ID NO: 1109 is the predicted protein sequence encoded by SEQ ID NO: 1105.

[1150] SEQ ID NO: 1109 is the predicted protein sequence encoded by SEQ ID NO: 1106.

[1151] SEQ ID NO: 1111 is the full length cDNA sequence for Hu.Keratin19, which shows similarity to clone CT2-167.

[1152] SEQ ID NO: 1112 is the full length cDNA sequence for Hu.IgG Fc-binding protein (FC(GAMMA)BP), which shows similarity to clone CT2-147 (41100).

[1153] SEQ ID NO: 1113 is the full length cDNA sequence for murine Valosin-containing protein, which shows similarity to clone CT2-222 (39848).

[1154] SEQ ID NO: 1114 is the full length cDNA sequence for human Valosin-containing protein, which shows similarity to clone CT2-222 (39848).

[1155] SEQ ID NO: 1115 is the predicted protein sequence encoded by SEQ ID NO: 1111.

[1156] SEQ ID NO: 1116 is the predicted protein sequence encoded by SEQ ID NO: 1112.

[1157] SEQ ID NO: 1117 is the predicted protein sequence encoded by SEQ ID NO: 1113.

[1158] SEQ ID NO: 1118 is the predicted protein sequence encoded by SEQ ID NO: 1114.

[1159] SEQ ID NO: 1119 is the determined cDNA sequence for MAPS-C884P.

[1160] SEQ ID NO: 1120 is the determined cDNA sequence C884P-HisTag.

[1161] SEQ ID NO: 1121 is the predicted protein sequence encoded by SEQ ID NO: 1119.

[1162] SEQ ID NO: 1122 is the predicted protein sequence encoded by SEQ ID NO: 1120.

### DETAILED DESCRIPTION OF THE INVENTION

[1163] As noted above, the present invention is generally directed to compositions and methods for the therapy and diagnosis of cancer, such as colon cancer. The compositions described herein may include colon tumor polypeptides, polynucleotides encoding such polypeptides, binding agents such as antibodies, antigen presenting cells (APCs) and/or immune system cells (e.g., T cells). Polypeptides of the present invention generally comprise at least a portion (such as an immunogenic portion) of a colon tumor protein or a variant thereof. A “colon tumor protein” is a protein that is expressed in colon tumor cells at a level that is at least two fold, and preferably at least five fold, greater than the level of expression in a normal tissue, as determined using a representative assay provided herein. Certain colon tumor proteins are tumor proteins that react detectably (within an immunoassay, such as an ELISA or Western blot) with antisera of a patient afflicted with colon cancer. Polynucleotides of the subject invention generally comprise a DNA or RNA sequence that encodes all or a portion of such a polypeptide, or that is complementary to such a sequence. Antibodies are generally immune system proteins, or antigen-binding fragments thereof, that are capable of binding to a polypeptide as described above. Antigen presenting cells include dendritic cells, macrophages, monocytes, fibroblasts and B-cells that express a polypeptide as described above. T cells that may be employed within such compositions are generally T cells that are specific for a polypeptide as described above.

[1164] The present invention is based on the discovery of human colon tumor proteins. Sequences of polynucleotides encoding specific tumor proteins are provided in SEQ ID NO: 1-121, 123-197, 205-630, 632-684, 686, 690-691, 694-1058, 1069, 1071-1076, 1082, 1084, 1086, 1092, 1094, 1096-1101, 1103-1106, 1111-1114, 1119, and 1120.

[1165] Colon Tumor Protein Polynucleotides

[1166] Any polynucleotide that encodes a colon tumor protein or a portion or other variant thereof as described herein is encompassed by the present invention. Preferred polynucleotides comprise at least 15 consecutive nucleotides, preferably at least 30 consecutive nucleotides and more preferably at least 45 consecutive nucleotides, that encode a portion of a colon tumor protein. More preferably, a polynucleotide encodes an immunogenic portion of a colon tumor protein. Polynucleotides complementary to any such sequences are also encompassed by the present invention. Polynucleotides may be single-stranded (coding or antisense) or double-stranded, and may be DNA (genomic, cDNA or synthetic) or RNA molecules. RNA molecules include HnRNA molecules, which contain introns and correspond to a DNA molecule in a one-to-one manner, and mRNA molecules, which do not contain introns. Additional coding or non-coding sequences may, but need not, be present within a polynucleotide of the present invention, and a polynucleotide may, but need not, be linked to other molecules and/or support materials.

[1167] Polynucleotides may comprise a native sequence (i.e., an endogenous sequence that encodes a colon tumor protein or a portion thereof) or may comprise a variant of such a sequence. Polynucleotide variants may contain one or more substitutions, additions, deletions and/or insertions such that the immunogenicity of the encoded polypeptide is not diminished, relative to a native tumor protein. The effect on the immunogenicity of the encoded polypeptide may generally be assessed as described herein. Variants preferably exhibit at least about 70% identity, more preferably at least about 80% identity and most preferably at least about 90% identity to a polynucleotide sequence that encodes a native colon tumor protein or a portion thereof.

[1168] Two polynucleotide or polypeptide sequences are said to be “identical” if the sequence of nucleotides or amino acids in the two sequences is the same when aligned for maximum correspondence as described below. Comparisons between two sequences are typically performed by comparing the sequences over a comparison window to identify and compare local regions of sequence similarity. A “comparison window” as used herein, refers to a segment of at least about 20 contiguous positions, usually 30 to about 75, in which a sequence may be compared to a reference sequence of the same number of contiguous positions after the two sequences are optimally aligned.

[1169] Optimal alignment of sequences for comparison may be conducted using the Megalign program in the Lasergene suite of bioinformatics software (DNASTAR, Inc., Madison, Wis.), using default parameters. This program embodies several alignment schemes described in the following references: Dayhoff, M. O. (1978) A model of evolutionary change in proteins—Matrices for detecting distant relationships. In Dayhoff, M. O. (ed.) Atlas of Protein Sequence and Structure, National Biomedical Research Foundation, Washington D.C. Vol. 5, Suppl. 3, pp. 345-358; Hein J. (1990) Unified Approach to Alignment and Phylogenes pp. 626-645 Methods in Enzymology vol. 183, Academic Press, Inc., San Diego, Calif.; Higgins, D. G. and Sharp, P. M. (1989) CABIOS 5:151-153; Myers, E. W. and Muller W. (1988) CABIOS 4:11-17; Robinson, E. D. (1971) Comb. Theor 11:105; Santou, N. Nes, M. (1987) Mol. Biol. Evol. 4:406-425; Sneath, P. H. A. and Sokal, R. R. (1973) Numerical Taxonomy—the Principles and Practice of Numerical Taxonomy, Freeman Press, San Francisco, Calif.; Wilbur, W. J. and Lipman, D. J. (1983) Proc. Natl. Acad., Sci. USA 80:726-730.

[1170] Preferably, the “percentage of sequence identity” is determined by comparing two optimally aligned sequences over a window of comparison of at least 20 positions, wherein the portion of the polynucleotide or polypeptide sequence in the comparison window may comprise additions or deletions (i.e. gaps) of 20 percent or less, usually 5 to 15 percent, or 10 to 12 percent, as compared to the reference sequence (which does not comprise additions or deletions) for optimal alignment of the two sequences. The percentage is calculated by determining the number of positions at which the identical nucleic acid bases or amino acid residue occurs in both sequences to yield the number of matched positions, dividing the number of matched positions by the total number of positions in the reference sequence (i.e. the window size) and multiplying the results by 100 to yield the percentage of sequence identity.

[1171] Variants may also, or alternatively, be substantially homologous to a native gene, or a portion or complement thereof. Such polynucleotide variants are capable of hybridizing under moderately stringent conditions to a naturally occurring DNA sequence encoding a native colon tumor protein (or a complementary sequence). Suitable moderately stringent conditions include prewashing in a solution of 5×SSC, 0.5% SDS, 1.0 mM EDTA (pH 8.0); hybridizing at 50° C.-65° C., 5×SSC, overnight; followed by washing twice at 65° C. for 20 minutes with each of 2×, 0.5× and 0.2×SSC containing 0.1% SDS.

[1172] It will be appreciated by those of ordinary skill in the art that, as a result of the degeneracy of the genetic code, there are many nucleotide sequences that encode a polypeptide as described herein. Some of these polynucleotides bear minimal homology to the nucleotide sequence of any native gene. Nonetheless, polynucleotides that vary due to differences in codon usage are specifically contemplated by the present invention. Further, alleles of the genes comprising the polynucleotide sequences provided herein are within the scope of the present invention. Alleles are endogenous genes that are altered as a result of one or more mutations, such as deletions, additions and/or substitutions of nucleotides. The resulting mRNA and protein may, but need not, have an altered structure or function. Alleles may be identified using standard techniques (such as hybridization, amplification and/or database sequence comparison).

[1173] Polynucleotides may be prepared using any of a variety of techniques. For example, a polynucleotide may be identified, as described in more detail below, by screening a microarray of cDNAs for tumor-associated expression (i.e., expression that is at least two fold greater in a colon tumor than in normal tissue, as determined using a representative assay provided herein). Such screens may be performed using a Synteni microarray (Palo Alto, Calif.) according to the manufacturer's instructions (and essentially as described by Schena et al., Proc. Natl. Acad. Sci. USA 93:10614-10619, 1996 and Heller et al., Proc. Natl. Acad. Sci. USA 94:2150-2155, 1997). Alternatively, polypeptides may be amplified from cDNA prepared from cells expressing the proteins described herein, such as colon tumor cells. Such polynucleotides may be amplified via polymerase chain reaction (PCR). For this approach, sequence-specific primers may be designed based on the sequences provided herein, and may be purchased or synthesized.

[1174] An amplified portion may be used to isolate a full length gene from a suitable library (e.g., a colon tumor cDNA library) using well known techniques. Within such techniques, a library (cDNA or genomic) is screened using one or more polynucleotide probes or primers suitable for amplification. Preferably, a library is size-selected to include larger molecules. Random primed libraries may also be preferred for identifying 5′ and upstream regions of genes. Genomic libraries are preferred for obtaining introns and extending 5′ sequences.

[1175] For hybridization techniques, a partial sequence may be labeled (e.g., by nick-translation or end-labeling with ³²p) using well known techniques. A bacterial or bacteriophage library is then screened by hybridizing filters containing denatured bacterial colonies (or lawns containing phage plaques) with the labeled probe (see Sambrook et al., Molecular Cloning: A Laboratory Manual, Cold Spring Harbor Laboratories, Cold Spring Harbor, N.Y., 1989). Hybridizing colonies or plaques are selected and expanded, and the DNA is isolated for further analysis. cDNA clones may be analyzed to determine the amount of additional sequence by, for example, PCR using a primer from the partial sequence and a primer from the vector. Restriction maps and partial sequences may be generated to identify one or more overlapping clones. The complete sequence may then be determined using standard techniques, which may involve generating a series of deletion clones. The resulting overlapping sequences are then assembled into a single contiguous sequence. A full length cDNA molecule can be generated by ligating suitable fragments, using well known techniques.

[1176] Alternatively, there are numerous amplification techniques for obtaining a full length coding sequence from a partial cDNA sequence. Within such techniques, amplification is generally performed via PCR. Any of a variety of commercially available kits may be used to perform the amplification step. Primers may be designed using, for example, software well known in the art. Primers are preferably 22-30 nucleotides in length, have a GC content of at least 50% and anneal to the target sequence at temperatures of about 68° C. to 72° C. The amplified region may be sequenced as described above, and overlapping sequences assembled into a contiguous sequence.

[1177] One such amplification technique is inverse PCR (see Triglia et al., Nucl. Acids Res. 16:8186, 1988), which uses restriction enzymes to generate a fragment in the known region of the gene. The fragment is then circularized by intramolecular ligation and used as a template for PCR with divergent primers derived from the known region. Within an alternative approach, sequences adjacent to a partial sequence may be retrieved by amplification with a primer to a linker sequence and a primer specific to a known region. The amplified sequences are typically subjected to a second round of amplification with the same linker primer and a second primer specific to the known region. A variation on this procedure, which employs two primers that initiate extension in opposite directions from the known sequence, is described in WO 96/38591. Another such technique is known as “rapid amplification of cDNA ends” or RACE. This technique involves the use of an internal primer and an external primer, which hybridizes to a polyA region or vector sequence, to identify sequences that are 5′ and 3′ of a known sequence. Additional techniques include capture PCR (Lagerstrom et al., PCR Methods Applic. 1:111-19, 1991) and walking PCR (Parker et al., Nucl. Acids Res. 19:3055-60, 1991). Other methods employing amplification may also be employed to obtain a full length cDNA sequence.

[1178] In certain instances, it is possible to obtain a full length cDNA sequence by analysis of sequences provided in an expressed sequence tag (EST) database, such as that available from GenBank. Searches for overlapping ESTs may generally be performed using well known programs (e.g., NCBI BLAST searches), and such ESTs may be used to generate a contiguous full length sequence.

[1179] Certain nucleic acid sequences of cDNA molecules encoding portions of colon tumor proteins are provided in SEQ ID NO: 1-121, 123-197, 205-630, 632-684, 686, 690-691, 694-1058, 1069, 1071-1076, 1082, 1084, 1086, 1092, 1094, 1096-1101, 1103-1106, 1111-1114, 1119, and 1120. These polynucleotides were isolated from colon tumor cDNA libraries using conventional and/or PCR-based subtraction techniques, as described below.

[1180] Polynucleotide variants may generally be prepared by any method known in the art, including chemical synthesis by, for example, solid phase phosphoramidite chemical synthesis. Modifications in a polynucleotide sequence may also be introduced using standard mutagenesis techniques, such as oligonucleotide-directed site-specific mutagenesis (see Adelman et al., DNA 2:183, 1983). Alternatively, RNA molecules may be generated by in vitro or in vivo transcription of DNA sequences encoding a colon tumor protein, or portion thereof, provided that the DNA is incorporated into a vector with a suitable RNA polymerase promoter (such as T7 or SP6). Certain portions may be used to prepare an encoded polypeptide, as described herein. In addition, or alternatively, a portion may be administered to a patient such that the encoded polypeptide is generated in vivo (e.g., by transfecting antigen-presenting cells, such as dendritic cells, with a cDNA construct encoding a colon tumor polypeptide, and administering the transfected cells to the patient).

[1181] A portion of a sequence complementary to a coding sequence (i.e., an antisense polynucleotide) may also be used as a probe or to modulate gene expression. cDNA constructs that can be transcribed into antisense RNA may also be introduced into cells of tissues to facilitate the production of antisense RNA. An antisense polynucleotide may be used, as described herein, to inhibit expression of a tumor protein. Antisense technology can be used to control gene expression through triple-helix formation, which compromises the ability of the double helix to open sufficiently for the binding of polymerases, transcription factors or regulatory molecules (see Gee et al., In Huber and Carr, Molecular and Immunologic Approaches, Futura Publishing Co. (Mt. Kisco, N.Y.; 1994)). Alternatively, an antisense molecule may be designed to hybridize with a control region of a gene (e.g., promoter, enhancer or transcription initiation site), and block transcription of the gene; or to block translation by inhibiting binding of a transcript to ribosomes.

[1182] A portion of a coding sequence, or of a complementary sequence, may also be designed as a probe or primer to detect gene expression. Probes may be labeled with a variety of reporter groups, such as radionuclides and enzymes, and are preferably at least 10 nucleotides in length, more preferably at least 20 nucleotides in length and still more preferably at least 30 nucleotides in length. Primers, as noted above, are preferably 22-30 nucleotides in length.

[1183] Any polynucleotide may be further modified to increase stability in vivo. Possible modifications include, but are not limited to, the addition of flanking sequences at the 5′ and/or 3′ ends; the use of phosphorothioate or 2′ O-methyl rather than phosphodiesterase linkages in the backbone; and/or the inclusion of nontraditional bases such as inosine, queosine and wybutosine, as well as acetyl- methyl-, thio- and other modified forms of adenine, cytidine, guanine, thymine and uridine.

[1184] Nucleotide sequences as described herein may be joined to a variety of other nucleotide sequences using established recombinant DNA techniques. For example, a polynucleotide may be cloned into any of a variety of cloning vectors, including plasmids, phagemids, lambda phage derivatives and cosmids. Vectors of particular interest include expression vectors, replication vectors, probe generation vectors and sequencing vectors. In general, a vector will contain an origin of replication functional in at least one organism, convenient restriction endonuclease sites and one or more selectable markers. Other elements will depend upon the desired use, and will be apparent to those of ordinary skill in the art.

[1185] Within certain embodiments, polynucleotides may be formulated so as to permit entry into a cell of a mammal, and expression therein. Such formulations are particularly useful for therapeutic purposes, as described below. Those of ordinary skill in the art will appreciate that there are many ways to achieve expression of a polynucleotide in a target cell, and any suitable method may be employed. For example, a polynucleotide may be incorporated into a viral vector such as, but not limited to, adenovirus, adeno associated virus, retrovirus, or vaccinia or other pox virus (e.g., avian pox virus). Techniques for incorporating DNA into such vectors are well known to those of ordinary skill in the art. A retroviral vector may additionally transfer or incorporate a gene for a selectable marker (to aid in the identification or selection of transduced cells) and/or a targeting moiety, such as a gene that encodes a ligand for a receptor on a specific target cell, to render the vector target specific. Targeting may also be accomplished using an antibody, by methods known to those of ordinary skill in the art.

[1186] Other formulations for therapeutic purposes include colloidal dispersion systems, such as macromolecule complexes, nanocapsules, microspheres, beads, and lipid-based systems including oil-in-water emulsions, micelles, mixed micelles, and liposomes. A preferred colloidal system for use as a delivery vehicle in vitro and in vivo is a liposome (i.e., an artificial membrane vesicle). The preparation and use of such systems is well known in the art.

[1187] Colon Tumor Polypeptides

[1188] Within the context of the present invention, polypeptides may comprise at least an immunogenic portion of a colon tumor protein or a variant thereof, as described herein. As noted above, a “colon tumor protein” is a protein that is expressed by colon tumor cells. Proteins that are colon tumor proteins also react detectably within an immunoassay (such as an ELISA) with antisera from a patient with colon cancer. Polypeptides as described herein may be of any length. Additional sequences derived from the native protein and/or heterologous sequences may be present, and such sequences may (but need not) possess further immunogenic or antigenic properties.

[1189] An “immunogenic portion,” as used herein is a portion of a protein that is recognized (i.e., specifically bound) by a B-cell and/or T-cell surface antigen receptor. Such immunogenic portions generally comprise at least 5 amino acid residues, more preferably at least 10, and still more preferably at least 20 amino acid residues of a colon tumor protein or a variant thereof. Certain preferred immunogenic portions include peptides in which an N-terminal leader sequence and/or transmembrane domain have been deleted. Other preferred immunogenic portions may contain a small N- and/or C-terminal deletion (e.g., 1-30 amino acids, preferably 5-15 amino acids), relative to the mature protein.

[1190] Immunogenic portions may generally be identified using well known techniques, such as those summarized in Paul, Fundamental Immunology, 3rd ed., 243-247 (Raven Press, 1993) and references cited therein. Such techniques include screening polypeptides for the ability to react with antigen-specific antibodies, antisera and/or T-cell lines or clones. As used herein, antisera and antibodies are “antigen-specific” if they specifically bind to an antigen (i.e., they react with the protein in an ELISA or other immunoassay, and do not react detectably with unrelated proteins). Such antisera and antibodies may be prepared as described herein, and using well known techniques. An immunogenic portion of a native colon tumor protein is a portion that reacts with such antisera and/or T-cells at a level that is not substantially less than the reactivity of the fall length polypeptide (e.g., in an ELISA and/or T-cell reactivity assay). Such immunogenic portions may react within such assays at a level that is similar to or greater than the reactivity of the full length polypeptide. Such screens may generally be performed using methods well known to those of ordinary skill in the art, such as those described in Harlow and Lane, Antibodies: A Laboratory Manual, Cold Spring Harbor Laboratory, 1988. For example, a polypeptide may be immobilized on a solid support and contacted with patient sera to allow binding of antibodies within the sera to the immobilized polypeptide. Unbound sera may then be removed and bound antibodies detected using, for example, ¹²⁵I-labeled Protein A.

[1191] As noted above, a composition may comprise a variant of a native colon tumor protein. A polypeptide “variant,” as used herein, is a polypeptide that differs from a native colon tumor protein in one or more substitutions, deletions, additions and/or insertions, such that the immunogenicity of the polypeptide is not substantially diminished. In other words, the ability of a variant to react with antigen-specific antisera may be enhanced or unchanged, relative to the native protein, or may be diminished by less than 50%, and preferably less than 20%, relative to the native protein. Such variants may generally be identified by modifying one of the above polypeptide sequences and evaluating the reactivity of the modified polypeptide with antigen-specific antibodies or antisera as described herein. Preferred variants include those in which one or more portions, such as an N-terminal leader sequence or transmembrane domain, have been removed. Other preferred variants include variants in which a small portion (e.g., 1-30 amino acids, preferably 5-15 amino acids) has been removed from the N- and/or C-terminal of the mature protein.

[1192] Polypeptide variants preferably exhibit at least about 70%, more preferably at least about 90% and most preferably at least about 95% identity (determined as described above) to the identified polypeptides.

[1193] Preferably, a variant contains conservative substitutions. A “conservative substitution” is one in which an amino acid is substituted for another amino acid that has similar properties, such that one skilled in the art of peptide chemistry would expect the secondary structure and hydropathic nature of the polypeptide to be substantially unchanged. Amino acid substitutions may generally be made on the basis of similarity in polarity, charge, solubility, hydrophobicity, hydrophilicity and/or the amphipathic nature of the residues. For example, negatively charged amino acids include aspartic acid and glutamic acid; positively charged amino acids include lysine and arginine; and amino acids with uncharged polar head groups having similar hydrophilicity values include leucine, isoleucine and valine; glycine and alanine; asparagine and glutamine; and serine, threonine, phenylalanine and tyrosine. Other groups of amino acids that may represent conservative changes include: (1) ala, pro, gly, glu, asp, gln, asn, ser, thr; (2) cys, ser, tyr, thr; (3) val, ile, leu, met, ala, phe; (4) lys, arg, his; and (5) phe, tyr, trp, his. A variant may also, or alternatively, contain non-conservative changes. In a preferred embodiment, variant polypeptides differ from a native sequence by substitution, deletion or addition of five amino acids or fewer. Variants may also (or alternatively) be modified by, for example, the deletion or addition of amino acids that have minimal influence on the immunogenicity, secondary structure and hydropathic nature of the polypeptide.

[1194] As noted above, polypeptides may comprise a signal (or leader) sequence at the N-terminal end of the protein which co-translationally or post-translationally directs transfer of the protein. The polypeptide may also be conjugated to a linker or other sequence for ease of synthesis, purification or identification of the polypeptide (e.g., poly-His), or to enhance binding of the polypeptide to a solid support. For example, a polypeptide may be conjugated to an immunoglobulin Fc region.

[1195] Polypeptides may be prepared using any of a variety of well known techniques. Recombinant polypeptides encoded by DNA sequences as described above may be readily prepared from the DNA sequences using any of a variety of expression vectors known to those of ordinary skill in the art. Expression may be achieved in any appropriate host cell that has been transformed or transfected with an expression vector containing a DNA molecule that encodes a recombinant polypeptide. Suitable host cells include prokaryotes, yeast and higher eukaryotic cells. Preferably, the host cells employed are E. coli, yeast or a mammalian cell line such as COS or CHO. Supernatants from suitable host/vector systems which secrete recombinant protein or polypeptide into culture media may be first concentrated using a commercially available filter. Following concentration, the concentrate may be applied to a suitable purification matrix such as an affinity matrix or an ion exchange resin. Finally, one or more reverse phase HPLC steps can be employed to further purify a recombinant polypeptide.

[1196] Portions and other variants having fewer than about 100 amino acids, and generally fewer than about 50 amino acids, may also be generated by synthetic means, using techniques well known to those of ordinary skill in the art. For example, such polypeptides may be synthesized using any of the commercially available solid-phase techniques, such as the Merrifield solid-phase synthesis method, where amino acids are sequentially added to a growing amino acid chain. See Merrifield, J. Am. Chem. Soc. 85:2149-2146, 1963. Equipment for automated synthesis of polypeptides is commercially available from suppliers such as Perkin Elmer/Applied BioSystems Division (Foster City, Calif.), and may be operated according to the manufacturer's instructions.

[1197] Within certain specific embodiments, a polypeptide may be a fusion protein that comprises multiple polypeptides as described herein, or that comprises at least one polypeptide as described herein and an unrelated sequence, such as a known tumor protein. A fusion partner may, for example, assist in providing T helper epitopes (an immunological fusion partner), preferably T helper epitopes recognized by humans, or may assist in expressing the protein (an expression enhancer) at higher yields than the native recombinant protein. Certain preferred fusion partners are both immunological and expression enhancing fusion partners. Other fusion partners may be selected so as to increase the solubility of the protein or to enable the protein to be targeted to desired intracellular compartments. Still further fusion partners include affinity tags, which facilitate purification of the protein.

[1198] Fusion proteins may generally be prepared using standard techniques, including chemical conjugation. Preferably, a fusion protein is expressed as a recombinant protein, allowing the production of increased levels, relative to a non-fused protein, in an expression system. Briefly, DNA sequences encoding the polypeptide components may be assembled separately, and ligated into an appropriate expression vector. The 3′ end of the DNA sequence encoding one polypeptide component is ligated, with or without a peptide linker, to the 5′ end of a DNA sequence encoding the second polypeptide component so that the reading frames of the sequences are in phase. This permits translation into a single fusion protein that retains the biological activity of both component polypeptides.

[1199] A peptide linker sequence may be employed to separate the first and the second polypeptide components by a distance sufficient to ensure that each polypeptide folds into its secondary and tertiary structures. Such a peptide linker sequence is incorporated into the fusion protein using standard techniques well known in the art. Suitable peptide linker sequences may be chosen based on the following factors: (1) their ability to adopt a flexible extended conformation; (2) their inability to adopt a secondary structure that could interact with functional epitopes on the first and second polypeptides; and (3) the lack of hydrophobic or charged residues that might react with the polypeptide functional epitopes. Preferred peptide linker sequences contain Gly, Asn and Ser residues. Other near neutral amino acids, such as Thr and Ala may also be used in the linker sequence. Amino acid sequences which may be usefully employed as linkers include those disclosed in Maratea et al., Gene 40:39-46, 1985; Murphy et al., Proc. Nati. Acad. Sci. USA 83:8258-8262, 1986; U.S. Pat. No. 4,935,233 and U.S. Pat. No. 4,751,180. The linker sequence may generally be from 1 to about 50 amino acids in length. Linker sequences are not required when the first and second polypeptides have non-essential N-terminal amino acid regions that can be used to separate the functional domains and prevent steric interference.

[1200] The ligated DNA sequences are operably linked to suitable transcriptional or translational regulatory elements. The regulatory elements responsible for expression of DNA are located only 5′ to the DNA sequence encoding the first polypeptides. Similarly, stop codons required to end translation and transcription termination signals are only present 3′ to the DNA sequence encoding the second polypeptide.

[1201] Fusion proteins are also provided that comprise a polypeptide of the present invention together with an unrelated immunogenic protein. Preferably the immunogenic protein is capable of eliciting a recall response. Examples of such proteins include tetanus, tuberculosis and hepatitis proteins (see, for example, Stoute et al. New Engl. J Med., 336:86-91, 1997).

[1202] Within preferred embodiments, an immunological fusion partner is derived from protein D, a surface protein of the gram-negative bacterium Haemophilus influenza B (WO 91/18926). Preferably, a protein D derivative comprises approximately the first third of the protein (e.g., the first N-terminal 100-110 amino acids), and a protein D derivative may be lipidated. Within certain preferred embodiments, the first 109 residues of a Lipoprotein D fusion partner is included on the N-terminus to provide the polypeptide with additional exogenous T-cell epitopes and to increase the expression level in E. coli (thus functioning as an expression enhancer). The lipid tail ensures optimal presentation of the antigen to antigen presenting cells. Other fusion partners include the non-structural protein from influenzae virus, NS1 (hemaglutinin). Typically, the N-terminal 81 amino acids are used, although different fragments that include T-helper epitopes may be used.

[1203] In another embodiment, the immunological fusion partner is the protein known as LYTA, or a portion thereof (preferably a C-terminal portion). LYTA is derived from Streptococcus pneumoniae, which synthesizes an N-acetyl-L-alanine amidase known as amidase LYTA (encoded by the LytA gene; Gene 43:265-292, 1986). LYTA is an autolysin that specifically degrades certain bonds in the peptidoglycan backbone. The C-terminal domain of the LYTA protein is responsible for the affinity to the choline or to some choline analogues such as DEAE. This property has been exploited for the development of E. coli C-LYTA expressing plasmids useful for expression of fusion proteins. Purification of hybrid proteins containing the C-LYTA fragment at the amino terminus has been described (see Biotechnology 10:795-798, 1992). Within a preferred embodiment, a repeat portion of LYTA may be incorporated into a fusion protein. A repeat portion is found in the C-terminal region starting at residue 178. A particularly preferred repeat portion incorporates residues 188-305.

[1204] In another embodiment, a Mycobacterium tuberculosis-derived Ra12 polynucleotide is linked to at least an immunogenic portion of a polynucleotide of this invention. Ra12 compositions and methods for their use in enhancing expression of heterologous polynucleotide sequences is described in U.S. patent application Ser. No. 60/158,585, the disclosure of which is incorporated herein by reference in its entirety. Briefly, Ra12 refers to a polynucleotide region that is a subsequence of a Mycobacterium tuberculosis MTB32A nucleic acid. MTB32A is a serine protease of 32 KD molecular weight encoded by a gene in virulent and avirulent strains of M. tuberculosis. The nucleotide sequence and amino acid sequence of MTB32A have been described (for example, U.S. patent application Ser. No. 60/158,585; see also, Skeiky et al., Infection and Immun. (1999) 67:3998-4007, incorporated herein by reference). Surprisingly, it was discovered that a 14 KD C-terminal fragment of the MTB32A coding sequence expresses at high levels on its own and remains as a soluble protein throughout the purification process. Moreover, Ra12 may enhance the immunogenicity of heterologous antigenic polypeptides with which it is fused. This 14 KD C-terminal fragment of the MTB32A is referred herein as Ra12 and represents a fragment comprising some or all of amino acid residues 192 to 323 of MTB32A.

[1205] Recombinant nucleic acids, which encode a fusion polypeptide comprising a Ra12 polypeptide and a heterologous colon tumor polypeptide of interest, can be readily constructed by conventional genetic engineering techniques. Recombinant nucleic acids are constructed so that, preferably, a Ra12 polynucleotide sequence is located 5′ to a selected heterologous colon tumor polynucleotide sequence. It may also be appropriate to place a Ra12 polynucleotide sequence 3′ to a selected heterologous polynucleotide sequence or to insert a heterologous polynucleotide sequence into a site within a Ra12 polynucleotide sequence.

[1206] In addition, any suitable polynucleotide that encodes a Ra12 or a portion or other variant thereof can be used in constructing recombinant fusion polynucleotides comprising Ra12 and one or more colon tumor polynucleotides disclosed herein. Preferred Ra12 polynucleotides generally comprise at least about 15 consecutive nucleotides, at least about 30 nucleotides, at least about 60 nucleotides, at least about 100 nucleotides, at least about 200 nucleotides, or at least about 300 nucleotides that encode a portion of a Ra12 polypeptide.

[1207] Ra12 polynucleotides may comprise a native sequence (i.e., an endogenous sequence that encodes a Ra12 polypeptide or a portion thereof) or may comprise a variant of such a sequence. Ra12 polynucleotide variants may contain one or more substitutions, additions, deletions and/or insertions such that the biological activity of the encoded fusion polypeptide is not substantially diminished, relative to a fusion polypeptide comprising a native Ra12 polypeptide. Variants preferably exhibit at least about 70% identity, more preferably at least about 80% identity and most preferably at least about 90% identity to a polynucleotide sequence that encodes a native Ra12 polypeptide or a portion thereof.

[1208] In general, polypeptides (including fusion proteins) and polynucleotides as described herein are isolated. An “isolated” polypeptide or polynucleotide is one that is removed from its original environment. For example, a naturally-occurring protein is isolated if it is separated from some or all of the coexisting materials in the natural system. Preferably, such polypeptides are at least about 90% pure, more preferably at least about 95% pure and most preferably at least about 99% pure. A polynucleotide is considered to be isolated if, for example, it is cloned into a vector that is not a part of the natural environment.

[1209] Binding Agents

[1210] The present invention further provides agents, such as antibodies and antigen-binding fragments thereof, that specifically bind to a colon tumor protein. As used herein, an antibody, or antigen-binding fragment thereof, is said to “specifically bind” to a colon tumor protein if it reacts at a detectable level (within, for example, an ELISA) with a colon tumor protein, and does not react detectably with unrelated proteins under similar conditions. As used herein, “binding” refers to a noncovalent association between two separate molecules such that a complex is formed. The ability to bind may be evaluated by, for example, determining a binding constant for the formation of the complex. The binding constant is the value obtained when the concentration of the complex is divided by the product of the component concentrations. In general, two compounds are said to “bind,” in the context of the present invention, when the binding constant for complex formation exceeds about 10³ L/mol. The binding constant may be determined using methods well known in the art.

[1211] Binding agents may be further capable of differentiating between patients with and without a cancer, such as colon cancer, using the representative assays provided herein. In other words, antibodies or other binding agents that bind to a colon tumor protein will generate a signal indicating the presence of a cancer in at least about 20% of patients with the disease, and will generate a negative signal indicating the absence of the disease in at least about 90% of individuals without the cancer. To determine whether a binding agent satisfies this requirement, biological samples (e.g., blood, sera, sputum, urine and/or tumor biopsies) from patients with and without a cancer (as determined using standard clinical tests) may be assayed as described herein for the presence of polypeptides that bind to the binding agent. It will be apparent that a statistically significant number of samples with and without the disease should be assayed. Each binding agent should satisfy the above criteria; however, those of ordinary skill in the art will recognize that binding agents may be used in combination to improve sensitivity.

[1212] Any agent that satisfies the above requirements may be a binding agent. For example, a binding agent may be a ribosome, with or without a peptide component, an RNA molecule or a polypeptide. In a preferred embodiment, a binding agent is an antibody or an antigen-binding fragment thereof. Antibodies may be prepared by any of a variety of techniques known to those of ordinary skill in the art. See, e.g., Harlow and Lane, Antibodies: A Laboratory Manual, Cold Spring Harbor Laboratory, 1988. In general, antibodies can be produced by cell culture techniques, including the generation of monoclonal antibodies as described herein, or via transfection of antibody genes into suitable bacterial or mammalian cell hosts, in order to allow for the production of recombinant antibodies. In one technique, an immunogen comprising the polypeptide is initially injected into any of a wide variety of mammals (e.g., mice, rats, rabbits, sheep or goats). In this step, the polypeptides of this invention may serve as the immunogen without modification. Alternatively, particularly for relatively short polypeptides, a superior immune response may be elicited if the polypeptide is joined to a carrier protein, such as bovine serum albumin or keyhole limpet hemocyanin. The immunogen is injected into the animal host, preferably according to a predetermined schedule incorporating one or more booster immunizations, and the animals are bled periodically. Polyclonal antibodies specific for the polypeptide may then be purified from such antisera by, for example, affinity chromatography using the polypeptide coupled to a suitable solid support.

[1213] Monoclonal antibodies specific for an antigenic polypeptide of interest may be prepared, for example, using the technique of Kohler and Milstein, Eur. J. Immunol. 6:511-519, 1976, and improvements thereto. Briefly, these methods involve the preparation of immortal cell lines capable of producing antibodies having the desired specificity (i.e., reactivity with the polypeptide of interest). Such cell lines may be produced, for example, from spleen cells obtained from an animal immunized as described above. The spleen cells are then immortalized by, for example, fusion with a myeloma cell fusion partner, preferably one that is syngeneic with the immunized animal. A variety of fusion techniques may be employed. For example, the spleen cells and myeloma cells may be combined with a nonionic detergent for a few minutes and then plated at low density on a selective medium that supports the growth of hybrid cells, but not myeloma cells. A preferred selection technique uses HAT (hypoxanthine, aminopterin, thymidine) selection. After a sufficient time, usually about 1 to 2 weeks, colonies of hybrids are observed. Single colonies are selected and their culture supernatants tested for binding activity against the polypeptide. Hybridomas having high reactivity and specificity are preferred.

[1214] Monoclonal antibodies may be isolated from the supernatants of growing hybridoma colonies. In addition, various techniques may be employed to enhance the yield, such as injection of the hybridoma cell line into the peritoneal cavity of a suitable vertebrate host, such as a mouse. Monoclonal antibodies may then be harvested from the ascites fluid or the blood. Contaminants may be removed from the antibodies by conventional techniques, such as chromatography, gel filtration, precipitation, and extraction. The polypeptides of this invention may be used in the purification process in, for example, an affinity chromatography step.

[1215] Within certain embodiments, the use of antigen-binding fragments of antibodies may be preferred. Such fragments include Fab fragments, which may be prepared using standard techniques. Briefly, immunoglobulins may be purified from rabbit serum by affinity chromatography on Protein A bead columns (Harlow and Lane, Antibodies: A Laboratory Manual, Cold Spring Harbor Laboratory, 1988) and digested by papain to yield Fab and Fc fragments. The Fab and Fc fragments may be separated by affinity chromatography on protein A bead columns.

[1216] Monoclonal antibodies of the present invention may be coupled to one or more therapeutic agents. Suitable agents in this regard include radionuclides, differentiation inducers, drugs, toxins, and derivatives thereof. Preferred radionuclides include ⁹⁰Y, ¹²³I, ¹²⁵I, ¹³¹I, ¹⁸⁶Re, ¹⁸⁸Re, ²¹¹At, and ²¹²Bi. Preferred drugs include methotrexate, and pyrimidine and purine analogs. Preferred differentiation inducers include phorbol esters and butyric acid. Preferred toxins include ricin, abrin, diptheria toxin, cholera toxin, gelonin, Pseudomonas exotoxin, Shigella toxin, and pokeweed antiviral protein.

[1217] A therapeutic agent may be coupled (e.g., covalently bonded) to a suitable monoclonal antibody either directly or indirectly (e.g., via a linker group). A direct reaction between an agent and an antibody is possible when each possesses a substituent capable of reacting with the other. For example, a nucleophilic group, such as an amino or sulfhydryl group, on one may be capable of reacting with a carbonyl-containing group, such as an anhydride or an acid halide, or with an alkyl group containing a good leaving group (e.g., a halide) on the other.

[1218] Alternatively, it may be desirable to couple a therapeutic agent and an antibody via a linker group. A linker group can function as a spacer to distance an antibody from an agent in order to avoid interference with binding capabilities. A linker group can also serve to increase the chemical reactivity of a substituent on an agent or an antibody, and thus increase the coupling efficiency. An increase in chemical reactivity may also facilitate the use of agents, or functional groups on agents, which otherwise would not be possible.

[1219] It will be evident to those skilled in the art that a variety of bifunctional or polyfunctional reagents, both homo- and hetero-functional (such as those described in the catalog of the Pierce Chemical Co., Rockford, Ill.), may be employed as the linker group. Coupling may be effected, for example, through amino groups, carboxyl groups, sulfhydryl groups or oxidized carbohydrate residues. There are numerous references describing such methodology, e.g., U.S. Pat. No. 4,671,958, to Rodwell et al.

[1220] Where a therapeutic agent is more potent when free from the antibody portion of the immunoconjugates of the present invention, it may be desirable to use a linker group which is cleavable during or upon internalization into a cell. A number of different cleavable linker groups have been described. The mechanisms for the intracellular release of an agent from these linker groups include cleavage by reduction of a disulfide bond (e.g., U.S. Pat. No. 4,489,710, to Spitler), by irradiation of a photolabile bond (e.g., U.S. Pat. No. 4,625,014, to Senter et al.), by hydrolysis of derivatized amino acid side chains (e.g., U.S. Pat. No. 4,638,045, to Kohn et al.), by serum complement-mediated hydrolysis (e.g., U.S. Pat. No. 4,671,958, to Rodwell et al.), and acid-catalyzed hydrolysis (e.g., U.S. Pat. No. 4,569,789, to Blattler et al.).

[1221] It may be desirable to couple more than one agent to an antibody. In one embodiment, multiple molecules of an agent are coupled to one antibody molecule. In another embodiment, more than one type of agent may be coupled to one antibody. Regardless of the particular embodiment, immunoconjugates with more than one agent may be prepared in a variety of ways. For example, more than one agent may be coupled directly to an antibody molecule, or linkers which provide multiple sites for attachment can be used. Alternatively, a carrier can be used.

[1222] A carrier may bear the agents in a variety of ways, including covalent bonding either directly or via a linker group. Suitable carriers include proteins such as albumins (e.g., U.S. Pat. No. 4,507,234, to Kato et al.), peptides and polysaccharides such as aminodextran (e.g., U.S. Pat. No. 4,699,784, to Shih et al.). A carrier may also bear an agent by noncovalent bonding or by encapsulation, such as within a liposome vesicle (e.g., U.S. Pat. Nos. 4,429,008 and 4,873,088). Carriers specific for radionuclide agents include radiohalogenated small molecules and chelating compounds. For example, U.S. Pat. No. 4,735,792 discloses representative radiohalogenated small molecules and their synthesis. A radionuclide chelate may be formed from chelating compounds that include those containing nitrogen and sulfur atoms as the donor atoms for binding the metal, or metal oxide, radionuclide. For example, U.S. Pat. No. 4,673,562, to Davison et al. discloses representative chelating compounds and their synthesis.

[1223] A variety of routes of administration for the antibodies and immunoconjugates may be used. Typically, administration will be intravenous, intramuscular, subcutaneous or in the bed of a resected tumor. It will be evident that the precise dose of the antibody/immunoconjugate will vary depending upon the antibody used, the antigen density on the tumor, and the rate of clearance of the antibody.

[1224] T Cells

[1225] Immunotherapeutic compositions may also, or alternatively, comprise T cells specific for a colon tumor protein. Such cells may generally be prepared in vitro or ex vivo, using standard procedures. For example, T cells may be isolated from bone marrow, peripheral blood, or a fraction of bone marrow or peripheral blood of a patient, using a commercially available cell separation system, such as the ISOLEX™ system, available from Nexell Therapeutics Inc., Irvine, Calif. Alternatively, T cells may be derived from related or unrelated humans, non-human mammals, cell lines or cultures.

[1226] T cells may be stimulated with a colon tumor polypeptide, polynucleotide encoding a colon tumor polypeptide and/or an antigen presenting cell (APC) that expresses such a polypeptide. Such stimulation is performed under conditions and for a time sufficient to permit the generation of T cells that are specific for the polypeptide. Preferably, a colon tumor polypeptide or polynucleotide is present within a delivery vehicle, such as a microsphere, to facilitate the generation of specific T cells.

[1227] T cells are considered to be specific for a colon tumor polypeptide if the T cells kill target cells coated with the polypeptide or expressing a gene encoding the polypeptide. T cell specificity may be evaluated using any of a variety of standard techniques. For example, within a chromium release assay or proliferation assay, a stimulation index of more than two fold increase in lysis and/or proliferation, compared to negative controls, indicates T cell specificity. Such assays may be performed, for example, as described in Chen et al., Cancer Res. 54:1065-1070, 1994. Alternatively, detection of the proliferation of T cells may be accomplished by a variety of known techniques. For example, T cell proliferation can be detected by measuring an increased rate of DNA synthesis (e.g., by pulse-labeling cultures of T cells with tritiated thymidine and measuring the amount of tritiated thymidine incorporated into DNA). Contact with a colon tumor polypeptide (100 ng/ml -100 μg/ml, preferably 200 ng/ml -25 μg/ml) for 3-7 days should result in at least a two fold increase in proliferation of the T cells. Contact as described above for 2-3 hours should result in activation of the T cells, as measured using standard cytokine assays in which a two fold increase in the level of cytokine release (e.g., TNF or IFN-γ) is indicative of T cell activation (see Coligan et al., Current Protocols in Immunology, vol. 1, Wiley Interscience (Greene 1998)). T cells that have been activated in response to a colon tumor polypeptide, polynucleotide or polypeptide-expressing APC may be CD4⁺ and/or CD8⁺. Colon tumor protein-specific T cells may be expanded using standard techniques. Within preferred embodiments, the T cells are derived from either a patient or a related, or unrelated, donor and are administered to the patient following stimulation and expansion.

[1228] For therapeutic purposes, CD4⁺ or CD8⁺ T cells that proliferate in response to a colon tumor polypeptide, polynucleotide or APC can be expanded in number either in vitro or in vivo. Proliferation of such T cells in vitro may be accomplished in a variety of ways. For example, the T cells can be re-exposed to a colon tumor polypeptide, or a short peptide corresponding to an immunogenic portion of such a polypeptide, with or without the addition of T cell growth factors, such as interleukin-2, and/or stimulator cells that synthesize a colon tumor polypeptide. Alternatively, one or more T cells that proliferate in the presence of a colon tumor protein can be expanded in number by cloning. Methods for cloning cells are well known in the art, and include limiting dilution.

[1229] Pharmaceutical Compositions and Vaccines

[1230] Within certain aspects, polypeptides, polynucleotides, T cells and/or binding agents disclosed herein may be incorporated into pharmaceutical compositions or immunogenic compositions (i.e., vaccines). Pharmaceutical compositions comprise one or more such compounds and a physiologically acceptable carrier. Vaccines may comprise one or more such compounds and an immunostimulant. An immunostimulant may be any substance that enhances or potentiates an immune response to an exogenous antigen. Examples of immunostimulants include adjuvants, biodegradable microspheres (e.g., polylactic galactide) and liposomes (into which the compound is incorporated; see e.g., Fullerton, U.S. Pat. No. 4,235,877). Vaccine preparation is generally described in, for example, M. F. Powell and M. J. Newman, eds., “Vaccine Design (the subunit and adjuvant approach),” Plenum Press (NY, 1995). Pharmaceutical compositions and vaccines within the scope of the present invention may also contain other compounds, which may be biologically active or inactive. For example, one or more immunogenic portions of other tumor antigens may be present, either incorporated into a fusion polypeptide or as a separate compound, within the composition or vaccine.

[1231] A pharmaceutical composition or vaccine may contain DNA encoding one or more of the polypeptides as described above, such that the polypeptide is generated in situ. As noted above, the DNA may be present within any of a variety of delivery systems known to those of ordinary skill in the art, including nucleic acid expression systems, bacteria and viral expression systems. Numerous gene delivery techniques are well known in the art, such as those described by Rolland, Crit. Rev. Therap. Drug Carrier Systems 15:143-198, 1998, and references cited therein. Appropriate nucleic acid expression systems contain the necessary DNA sequences for expression in the patient (such as a suitable promoter and terminating signal). Bacterial delivery systems involve the administration of a bacterium (such as Bacillus-Calmette-Guerrin) that expresses an immunogenic portion of the polypeptide on its cell surface or secretes such an epitope. In a preferred embodiment, the DNA may be introduced using a viral expression system (e.g., vaccinia or other pox virus, retrovirus, or adenovirus), which may involve the use of a non-pathogenic (defective), replication competent virus. Suitable systems are disclosed, for example, in Fisher-Hoch et al., Proc. Natl. Acad. Sci. USA 86:317-321, 1989; Flexner et al., Ann. N.Y. Acad. Sci. 569:86-103, 1989; Flexner et al., Vaccine 8:17-21, 1990; U.S. Pat. Nos. 4,603,112, 4,769,330, and 5,017,487; WO 89/01973; U.S. Pat. No. 4,777,127; GB 2,200,651; EP 0,345,242; WO 91/02805; Berkner, Biotechniques 6:616-627, 1988; Rosenfeld et al., Science 252:431-434, 1991; Kolls et al., Proc. Natl. Acad. Sci. USA 91:215-219, 1994; Kass-Eisler et al., Proc. Natl. Acad. Sci. USA 90:11498-11502, 1993; Guzman et al., Circulation 88:2838-2848, 1993; and Guzman et al., Cir. Res. 73:1202-1207, 1993. Techniques for incorporating DNA into such expression systems are well known to those of ordinary skill in the art. The DNA may also be “naked,” as described, for example, in Ulmer et al., Science 259:1745-1749, 1993 and reviewed by Cohen, Science 259:1691-1692, 1993. The uptake of naked DNA may be increased by coating the DNA onto biodegradable beads, which are efficiently transported into the cells.

[1232] While any suitable carrier known to those of ordinary skill in the art may be employed in the pharmaceutical compositions of this invention, the type of carrier will vary depending on the mode of administration. Compositions of the present invention may be formulated for any appropriate manner of administration, including for example, topical, oral, nasal, intravenous, intracranial, intraperitoneal, subcutaneous or intramuscular administration. For parenteral administration, such as subcutaneous injection, the carrier preferably comprises water, saline, alcohol, a fat, a wax or a buffer. For oral administration, any of the above carriers or a solid carrier, such as mannitol, lactose, starch, magnesium stearate, sodium saccharine, talcum, cellulose, glucose, sucrose, and magnesium carbonate, may be employed. Biodegradable microspheres (e.g., polylactate polyglycolate) may also be employed as carriers for the pharmaceutical compositions of this invention. Suitable biodegradable microspheres are disclosed, for example, in U.S. Pat. Nos. 4,897,268 and 5,075,109.

[1233] Such compositions may also comprise buffers (e.g., neutral buffered saline or phosphate buffered saline), carbohydrates (e.g., glucose, mannose, sucrose or dextrans), mannitol, proteins, polypeptides or amino acids such as glycine, antioxidants, chelating agents such as EDTA or glutathione, adjuvants (e.g., aluminum hydroxide) and/or preservatives. Alternatively, compositions of the present invention may be formulated as a lyophilizate. Compounds may also be encapsulated within liposomes using well known technology.

[1234] Any of a variety of immunostimulants may be employed in the vaccines of this invention. For example, an adjuvant may be included. Most adjuvants contain a substance designed to protect the antigen from rapid catabolism, such as aluminum hydroxide or mineral oil, and a stimulator of immune responses, such as lipid A, Bortadella pertussis or Mycobacterium tuberculosis derived proteins. Suitable adjuvants are commercially available as, for example, Freund's Incomplete Adjuvant and Complete Adjuvant (Difco Laboratories, Detroit, Mich.); Merck Adjuvant 65 (Merck and Company, Inc., Rahway, N.J.); AS-2 (SmithKline Beecham, Philadelphia, Pa.); aluminum salts such as aluminum hydroxide gel (alum) or aluminum phosphate; salts of calcium, iron or zinc; an insoluble suspension of acylated tyrosine; acylated sugars; cationically or anionically derivatized polysaccharides; polyphosphazenes; biodegradable microspheres; monophosphoryl lipid A and quil A. Cytokines, such as GM-CSF or interleukin-2, -7, or -12, may also be used as adjuvants.

[1235] Within the vaccines provided herein, the adjuvant composition is preferably designed to induce an immune response predominantly of the Th1 type. High levels of Th1-type cytokines (e.g., IFN-γ, TNFα, IL-2 and IL-12) tend to favor the induction of cell mediated immune responses to an administered antigen. In contrast, high levels of Th2-type cytokines (e.g., IL-4, IL-5, IL-6 and IL-10) tend to favor the induction of humoral immune responses. Following application of a vaccine as provided herein, a patient will support an immune response that includes Th1- and Th2-type responses. Within a preferred embodiment, in which a response is predominantly Th1-type, the level of Th1-type cytokines will increase to a greater extent than the level of Th2-type cytokines. The levels of these cytokines may be readily assessed using standard assays. For a review of the families of cytokines, see Mosmann and Coffman, Ann. Rev. Immunol. 7:145-173, 1989.

[1236] Preferred adjuvants for use in eliciting a predominantly Th1-type response include, for example, a combination of monophosphoryl lipid A, preferably 3-de-O-acylated monophosphoryl lipid A (3D-MPL), together with an aluminum salt. MPL adjuvants are available from Corixa Corp. (Seattle, Wash.) (see U.S. Pat. Nos. 4,436,727; 4,877,611; 4,866,034 and 4,912,094). CpG-containing oligonucleotides (in which the CpG dinucleotide is unmethylated) also induce a predominantly Th1response. Such oligonucleotides are well known and are described, for example, in WO 96/02555 and WO 99/33488. Immunostimulatory DNA sequences are also described, for example, by Sato et al., Science 273:352, 1996. Another preferred adjuvant is a saponin, preferably QS21 (Aquila Biopharmaceuticals Inc., Framingham, Mass.), which may be used alone or in combination with other adjuvants. For example, an enhanced system involves the combination of a monophosphoryl lipid A and saponin derivative, such as the combination of QS21 and 3D-MPL as described in WO 94/00153, or a less reactogenic composition where the QS21 is quenched with cholesterol, as described in WO 96/33739. Other preferred formulations comprises an oil-in-water emulsion and tocopherol. A particularly potent adjuvant formulation involving QS21, 3D-MPL and tocopherol in an oil-in-water emulsion is described in WO 95/17210.

[1237] Other preferred adjuvants include Montanide ISA 720 (Seppic, France), SAF (Chiron, Calif., United States), ISCOMS (CSL), MF-59 (Chiron), the SBAS series of adjuvants (e.g., SBAS-2 or SBAS-4, available from SmithKline Beecham, Rixensart, Belgium), Detox (Ribi ImmunoChem Research Inc., Hamilton, Mont.), RC-529 (Corixa, Seattle, Wash.) and Aminoalkyl glucosaminide 4-phosphates (AGPs).

[1238] Any vaccine provided herein may be prepared using well known methods that result in a combination of antigen, immune response enhancer and a suitable carrier or excipient. The compositions described herein may be administered as part of a sustained release formulation (i.e., a formulation such as a capsule, sponge or gel (composed of polysaccharides, for example) that effects a slow release of compound following administration). Such formulations may generally be prepared using well known technology (see, e.g. Coombes et al., Vaccine 14:1429-1438, 1996) and administered by, for example, oral, rectal or subcutaneous implantation, or by implantation at the desired target site. Sustained-release formulations may contain a polypeptide, polynucleotide or antibody dispersed in a carrier matrix and/or contained within a reservoir surrounded by a rate controlling membrane.

[1239] Carriers for use within such formulations are biocompatible, and may also be biodegradable; preferably the formulation provides a relatively constant level of active component release. Such carriers include microparticles of poly(lactide-co-glycolide), as well as polyacrylate, latex, starch, cellulose and dextran. Other delayed-release carriers include supramolecular biovectors, which comprise a non-liquid hydrophilic core (e.g., a cross-linked polysaccharide or oligosaccharide) and, optionally, an external layer comprising an amphiphilic compound, such as a phospholipid (see e.g., U.S. Pat. No. 5,151,254 and PCT applications WO 94/20078, WO/94/23701 and WO 96/06638). The amount of active compound contained within a sustained release formulation depends upon the site of implantation, the rate and expected duration of release and the nature of the condition to be treated or prevented.

[1240] Any of a variety of delivery vehicles may be employed within pharmaceutical compositions and vaccines to facilitate production of an antigen-specific immune response that targets tumor cells. Delivery vehicles include antigen presenting cells (APCs), such as dendritic cells, macrophages, B cells, monocytes and other cells that may be engineered to be efficient APCs. Such cells may, but need not, be genetically modified to increase the capacity for presenting the antigen, to improve activation and/or maintenance of the T cell response, to have anti-tumor effects per se and/or to be immunologically compatible with the receiver (i.e., matched HLA haplotype). APCs may generally be isolated from any of a variety of biological fluids and organs, including tumor and peritumoral tissues, and may be autologous, allogeneic, syngeneic or xenogeneic cells.

[1241] Certain preferred embodiments of the present invention use dendritic cells or progenitors thereof as antigen-presenting cells. Dendritic cells are highly potent APCs (Banchereau and Steinman, Nature 392:245-251, 1998) and have been shown to be effective as a physiological adjuvant for eliciting prophylactic or therapeutic antitumor immunity (see Timmerman and Levy, Ann. Rev. Med. 50:507-529, 1999). In general, dendritic cells may be identified based on their typical shape (stellate in situ, with marked cytoplasmic processes (dendrites) visible in vitro), their ability to take up, process and present antigens with high efficiency, and their ability to activate naive T cell responses. Dendritic cells may, of course, be engineered to express specific cell-surface receptors or ligands that are not commonly found on dendritic cells in vivo or ex vivo, and such modified dendritic cells are contemplated by the present invention. As an alternative to dendritic cells, secreted vesicles antigen-loaded dendritic cells (called exosomes) may be used within a vaccine (see Zitvogel et al., Nature Med. 4:594-600, 1998).

[1242] Dendritic cells and progenitors may be obtained from peripheral blood, bone marrow, tumor-infiltrating cells, peritumoral tissues-infiltrating cells, lymph nodes, spleen, skin, umbilical cord blood or any other suitable tissue or fluid. For example, dendritic cells may be differentiated ex vivo by adding a combination of cytokines such as GM-CSF, IL-4, IL-13 and/or TNFα to cultures of monocytes harvested from peripheral blood. Alternatively, CD34 positive cells harvested from peripheral blood, umbilical cord blood or bone marrow may be differentiated into dendritic cells by adding to the culture medium combinations of GM-CSF, IL-3, TNFα, CD40 ligand, LPS, flt3 ligand and/or other compound(s) that induce differentiation, maturation and proliferation of dendritic cells.

[1243] Dendritic cells are conveniently categorized as “immature” and “mature” cells, which allows a simple way to discriminate between two well characterized phenotypes. However, this nomenclature should not be construed to exclude all possible intermediate stages of differentiation. Immature dendritic cells are characterized as APC with a high capacity for antigen uptake and processing, which correlates with the high expression of Fcγ receptor and mannose receptor. The mature phenotype is typically characterized by a lower expression of these markers, but a high expression of cell surface molecules responsible for T cell activation such as class I and class II MHC, adhesion molecules (e.g., CD54 and CD11) and costimulatory molecules (e.g., CD40, CD80, CD86 and 4-1BB).

[1244] APCs may generally be transfected with a polynucleotide encoding a colon tumor protein (or portion or other variant thereof) such that the colon tumor polypeptide, or an immunogenic portion thereof, is expressed on the cell surface. Such transfection may take place ex vivo, and a composition or vaccine comprising such transfected cells may then be used for therapeutic purposes, as described herein. Alternatively, a gene delivery vehicle that targets a dendritic or other antigen presenting cell may be administered to a patient, resulting in transfection that occurs in vivo. In vivo and ex vivo transfection of dendritic cells, for example, may generally be performed using any methods known in the art, such as those described in WO 97/24447, or the gene gun approach described by Mahvi et al., Immunology and cell Biology 75:456-460, 1997. Antigen loading of dendritic cells may be achieved by incubating dendritic cells or progenitor cells with the colon tumor polypeptide, DNA (naked or within a plasmid vector) or RNA; or with antigen-expressing recombinant bacterium or viruses (e.g., vaccinia, fowlpox, adenovirus or lentivirus vectors). Prior to loading, the polypeptide may be covalently conjugated to an immunological partner that provides T cell help (e.g., a carrier molecule). Alternatively, a dendritic cell may be pulsed with a non-conjugated immunological partner, separately or in the presence of the polypeptide.

[1245] Vaccines and pharmaceutical compositions may be presented in unit-dose or multi-dose containers, such as sealed ampoules or vials. Such containers are preferably hermetically sealed to preserve sterility of the formulation until use. In general, formulations may be stored as suspensions, solutions or emulsions in oily or aqueous vehicles. Alternatively, a vaccine or pharmaceutical composition may be stored in a freeze-dried condition requiring only the addition of a sterile liquid carrier immediately prior to use.

[1246] Cancer Therapy

[1247] In further aspects of the present invention, the compositions described herein may be used for immunotherapy of cancer, such as colon cancer. Within such methods, pharmaceutical compositions and vaccines are typically administered to a patient. As used herein, a “patient” refers to any warm-blooded animal, preferably a human. A patient may or may not be afflicted with cancer. Accordingly, the above pharmaceutical compositions and vaccines may be used to prevent the development of a cancer or to treat a patient afflicted with a cancer. A cancer may be diagnosed using criteria generally accepted in the art, including the presence of a malignant tumor. Pharmaceutical compositions and vaccines may be administered either prior to or following surgical removal of primary tumors and/or treatment such as administration of radiotherapy or conventional chemotherapeutic drugs.

[1248] Within certain embodiments, immunotherapy may be active immunotherapy, in which treatment relies on the in vivo stimulation of the endogenous host immune system to react against tumors with the administration of immune response-modifying agents (such as polypeptides and polynucleotides disclosed herein).

[1249] Within other embodiments, immunotherapy may be passive immunotherapy, in which treatment involves the delivery of agents with established tumor-immune reactivity (such as effector cells or antibodies) that can directly or indirectly mediate antitumor effects and does not necessarily depend on an intact host immune system. Examples of effector cells include T cells as discussed above, T lymphocytes (such as CD8⁺ cytotoxic T lymphocytes and CD4⁺ T-helper tumor-infiltrating lymphocytes), killer cells (such as Natural Killer cells and lymphokine-activated killer cells), B cells and antigen-presenting cells (such as dendritic cells and macrophages) expressing a polypeptide provided herein. T cell receptors and antibody receptors specific for the polypeptides recited herein may be cloned, expressed and transferred into other vectors or effector cells for adoptive immunotherapy. The polypeptides provided herein may also be used to generate antibodies or anti-idiotypic antibodies (as described above and in U.S. Pat. No. 4,918,164) for passive immunotherapy.

[1250] Effector cells may generally be obtained in sufficient quantities for adoptive immunotherapy by growth in vitro, as described herein. Culture conditions for expanding single antigen-specific effector cells to several billion in number with retention of antigen recognition in vivo are well known in the art. Such in vitro culture conditions typically use intermittent stimulation with antigen, often in the presence of cytokines (such as IL-2) and non-dividing feeder cells. As noted above, immunoreactive polypeptides as provided herein may be used to rapidly expand antigen-specific T cell cultures in order to generate a sufficient number of cells for immunotherapy. In particular, antigen-presenting cells, such as dendritic, macrophage, monocyte, fibroblast and/or B cells, may be pulsed with immunoreactive polypeptides or transfected with one or more polynucleotides using standard techniques well known in the art. For example, antigen-presenting cells can be transfected with a polynucleotide having a promoter appropriate for increasing expression in a recombinant virus or other expression system. Cultured effector cells for use in therapy must be able to grow and distribute widely, and to survive long term in vivo. Studies have shown that cultured effector cells can be induced to grow in vivo and to survive long term in substantial numbers by repeated stimulation with antigen supplemented with IL-2 (see, for example, Cheever et al., Immunological Reviews 157:177, 1997).

[1251] Alternatively, a vector expressing a polypeptide recited herein may be introduced into antigen presenting cells taken from a patient and clonally propagated ex vivo for transplant back into the same patient. Transfected cells may be reintroduced into the patient using any means known in the art, preferably in sterile form by intravenous, intracavitary, intraperitoneal or intratumor administration.

[1252] Routes and frequency of administration of the therapeutic compositions disclosed herein, as well as dosage, will vary from individual to individual, and may be readily established using standard techniques. In general, the pharmaceutical compositions and vaccines may be administered by injection (e.g., intracutaneous, intramuscular, intravenous or subcutaneous), intranasally (e.g., by aspiration) or orally. Preferably, between 1 and 10 doses may be administered over a 52 week period. Preferably, 6 doses are administered, at intervals of 1 month, and booster vaccinations may be given periodically thereafter. Alternate protocols may be appropriate for individual patients. A suitable dose is an amount of a compound that, when administered as described above, is capable of promoting an anti-tumor immune response, and is at least 10-50% above the basal (i.e., untreated) level. Such response can be monitored by measuring the anti-tumor antibodies in a patient or by vaccine-dependent generation of cytolytic effector cells capable of killing the patient's tumor cells in vitro. Such vaccines should also be capable of causing an immune response that leads to an improved clinical outcome (e.g., more frequent remissions, complete or partial or longer disease-free survival) in vaccinated patients as compared to non-vaccinated patients. In general, for pharmaceutical compositions and vaccines comprising one or more polypeptides, the amount of each polypeptide present in a dose ranges from about 25 μg to 5 mg per kg of host. Suitable dose sizes will vary with the size of the patient, but will typically range from about 0.1 mL to about 5 mL.

[1253] In general, an appropriate dosage and treatment regimen provides the active compound(s) in an amount sufficient to provide therapeutic and/or prophylactic benefit. Such a response can be monitored by establishing an improved clinical outcome (e.g., more frequent remissions, complete or partial, or longer disease-free survival) in treated patients as compared to non-treated patients. Increases in preexisting immune responses to a colon tumor protein generally correlate with an improved clinical outcome. Such immune responses may generally be evaluated using standard proliferation, cytotoxicity or cytokine assays, which may be performed using samples obtained from a patient before and after treatment.

[1254] Methods for Detecting Cancer

[1255] In general, a cancer may be detected in a patient based on the presence of one or more colon tumor proteins and/or polynucleotides encoding such proteins in a biological sample (for example, blood, sera, sputum, urine and/or tumor biopsies) obtained from the patient. In other words, such proteins may be used as markers to indicate the presence or absence of a cancer such as colon cancer. In addition, such proteins may be useful for the detection of other cancers. The binding agents provided herein generally permit detection of the level of antigen that binds to the agent in the biological sample. Polynucleotide primers and probes may be used to detect the level of mRNA encoding a tumor protein, which is also indicative of the presence or absence of a cancer. In general, a colon tumor sequence should be present at a level that is at least three fold higher in tumor tissue than in normal tissue

[1256] There are a variety of assay formats known to those of ordinary skill in the art for using a binding agent to detect polypeptide markers in a sample. See, e.g., Harlow and Lane, Antibodies: A Laboratory Manual, Cold Spring Harbor Laboratory, 1988. In general, the presence or absence of a cancer in a patient may be determined by (a) contacting a biological sample obtained from a patient with a binding agent; (b) detecting in the sample a level of polypeptide that binds to the binding agent; and (c) comparing the level of polypeptide with a predetermined cut-off value.

[1257] In a preferred embodiment, the assay involves the use of binding agent immobilized on a solid support to bind to and remove the polypeptide from the remainder of the sample. The bound polypeptide may then be detected using a detection reagent that contains a reporter group and specifically binds to the binding agent/polypeptide complex. Such detection reagents may comprise, for example, a binding agent that specifically binds to the polypeptide or an antibody or other agent that specifically binds to the binding agent, such as an anti-immunoglobulin, protein G, protein A or a lectin. Alternatively, a competitive assay may be utilized, in which a polypeptide is labeled with a reporter group and allowed to bind to the immobilized binding agent after incubation of the binding agent with the sample. The extent to which components of the sample inhibit the binding of the labeled polypeptide to the binding agent is indicative of the reactivity of the sample with the immobilized binding agent. Suitable polypeptides for use within such assays include full length colon tumor proteins and portions thereof to which the binding agent binds, as described above.

[1258] The solid support may be any material known to those of ordinary skill in the art to which the tumor protein may be attached. For example, the solid support may be a test well in a microtiter plate or a nitrocellulose or other suitable membrane. Alternatively, the support may be a bead or disc, such as glass, fiberglass, latex or a plastic material such as polystyrene or polyvinylchloride. The support may also be a magnetic particle or a fiber optic sensor, such as those disclosed, for example, in U.S. Pat. No. 5,359,681. The binding agent may be immobilized on the solid support using a variety of techniques known to those of skill in the art, which are amply described in the patent and scientific literature. In the context of the present invention, the term “immobilization” refers to both noncovalent association, such as adsorption, and covalent attachment (which may be a direct linkage between the agent and functional groups on the support or may be a linkage by way of a cross-linking agent). Immobilization by adsorption to a well in a microtiter plate or to a membrane is preferred. In such cases, adsorption may be achieved by contacting the binding agent, in a suitable buffer, with the solid support for a suitable amount of time. The contact time varies with temperature, but is typically between about 1 hour and about 1 day. In general, contacting a well of a plastic microtiter plate (such as polystyrene or polyvinylchloride) with an amount of binding agent ranging from about 10 ng to about 10 μg, and preferably about 100 ng to about 1 μg, is sufficient to immobilize an adequate amount of binding agent.

[1259] Covalent attachment of binding agent to a solid support may generally be achieved by first reacting the support with a bifunctional reagent that will react with both the support and a functional group, such as a hydroxyl or amino group, on the binding agent. For example, the binding agent may be covalently attached to supports having an appropriate polymer coating using benzoquinone or by condensation of an aldehyde group on the support with an amine and an active hydrogen on the binding partner (see, e.g., Pierce Immunotechnology Catalog and Handbook, 1991, at A12-A13).

[1260] In certain embodiments, the assay is a two-antibody sandwich assay. This assay may be performed by first contacting an antibody that has been immobilized on a solid support, commonly the well of a microtiter plate, with the sample, such that polypeptides within the sample are allowed to bind to the immobilized antibody. Unbound sample is then removed from the immobilized polypeptide-antibody complexes and a detection reagent (preferably a second antibody capable of binding to a different site on the polypeptide) containing a reporter group is added. The amount of detection reagent that remains bound to the solid support is then determined using a method appropriate for the specific reporter group.

[1261] More specifically, once the antibody is immobilized on the support as described above, the remaining protein binding sites on the support are typically blocked. Any suitable blocking agent known to those of ordinary skill in the art, such as bovine serum albumin or Tween 20™ (Sigma Chemical Co., St. Louis, Mo.). The immobilized antibody is then incubated with the sample, and polypeptide is allowed to bind to the antibody. The sample may be diluted with a suitable diluent, such as phosphate-buffered saline (PBS) prior to incubation. In general, an appropriate contact time (i.e., incubation time) is a period of time that is sufficient to detect the presence of polypeptide within a sample obtained from an individual with colon cancer. Preferably, the contact time is sufficient to achieve a level of binding that is at least about 95% of that achieved at equilibrium between bound and unbound polypeptide. Those of ordinary skill in the art will recognize that the time necessary to achieve equilibrium may be readily determined by assaying the level of binding that occurs over a period of time. At room temperature, an incubation time of about 30 minutes is generally sufficient.

[1262] Unbound sample may then be removed by washing the solid support with an appropriate buffer, such as PBS containing 0.1% Tween 20™. The second antibody, which contains a reporter group, may then be added to the solid support. Preferred reporter groups include those groups recited above.

[1263] The detection reagent is then incubated with the immobilized antibody-polypeptide complex for an amount of time sufficient to detect the bound polypeptide. An appropriate amount of time may generally be determined by assaying the level of binding that occurs over a period of time. Unbound detection reagent is then removed and bound detection reagent is detected using the reporter group. The method employed for detecting the reporter group depends upon the nature of the reporter group. For radioactive groups, scintillation counting or autoradiographic methods are generally appropriate. Spectroscopic methods may be used to detect dyes, luminescent groups and fluorescent groups. Biotin may be detected using avidin, coupled to a different reporter group (commonly a radioactive or fluorescent group or an enzyme). Enzyme reporter groups may generally be detected by the addition of substrate (generally for a specific period of time), followed by spectroscopic or other analysis of the reaction products.

[1264] To determine the presence or absence of a cancer, such as colon cancer, the signal detected from the reporter group that remains bound to the solid support is generally compared to a signal that corresponds to a predetermined cut-off value. In one preferred embodiment, the cut-off value for the detection of a cancer is the average mean signal obtained when the immobilized antibody is incubated with samples from patients without the cancer. In general, a sample generating a signal that is three standard deviations above the predetermined cut-off value is considered positive for the cancer. In an alternate preferred embodiment, the cut-off value is determined using a Receiver Operator Curve, according to the method of Sackett et al., Clinical Epidemiology: A Basic Science for Clinical Medicine, Little Brown and Co., 1985, p. 106-7. Briefly, in this embodiment, the cut-off value may be determined from a plot of pairs of true positive rates (i.e., sensitivity) and false positive rates (100%-specificity) that correspond to each possible cut-off value for the diagnostic test result. The cut-off value on the plot that is the closest to the upper left-hand corner (i.e., the value that encloses the largest area) is the most accurate cut-off value, and a sample generating a signal that is higher than the cut-off value determined by this method may be considered positive. Alternatively, the cut-off value may be shifted to the left along the plot, to minimize the false positive rate, or to the right, to minimize the false negative rate. In general, a sample generating a signal that is higher than the cut-off value determined by this method is considered positive for a cancer.

[1265] In a related embodiment, the assay is performed in a flow-through or strip test format, wherein the binding agent is immobilized on a membrane, such as nitrocellulose. In the flow-through test, polypeptides within the sample bind to the immobilized binding agent as the sample passes through the membrane. A second, labeled binding agent then binds to the binding agent-polypeptide complex as a solution containing the second binding agent flows through the membrane. The detection of bound second binding agent may then be performed as described above. In the strip test format, one end of the membrane to which binding agent is bound is immersed in a solution containing the sample. The sample migrates along the membrane through a region containing second binding agent and to the area of immobilized binding agent. Concentration of second binding agent at the area of immobilized antibody indicates the presence of a cancer. Typically, the concentration of second binding agent at that site generates a pattern, such as a line, that can be read visually. The absence of such a pattern indicates a negative result. In general, the amount of binding agent immobilized on the membrane is selected to generate a visually discernible pattern when the biological sample contains a level of polypeptide that would be sufficient to generate a positive signal in the two-antibody sandwich assay, in the format discussed above. Preferred binding agents for use in such assays are antibodies and antigen-binding fragments thereof. Preferably, the amount of antibody immobilized on the membrane ranges from about 25 ng to about 1 μg, and more preferably from about 50 ng to about 500 ng. Such tests can typically be performed with a very small amount of biological sample.

[1266] Of course, numerous other assay protocols exist that are suitable for use with the tumor proteins or binding agents of the present invention. The above descriptions are intended to be exemplary only. For example, it will be apparent to those of ordinary skill in the art that the above protocols may be readily modified to use colon tumor polypeptides to detect antibodies that bind to such polypeptides in a biological sample. The detection of such colon tumor protein specific antibodies may correlate with the presence of a cancer.

[1267] A cancer may also, or alternatively, be detected based on the presence of T cells that specifically react with a colon tumor protein in a biological sample. Within certain methods, a biological sample comprising CD4⁺ and/or CD8⁺ T cells isolated from a patient is incubated with a colon tumor polypeptide, a polynucleotide encoding such a polypeptide and/or an APC that expresses at least an immunogenic portion of such a polypeptide, and the presence or absence of specific activation of the T cells is detected. Suitable biological samples include, but are not limited to, isolated T cells. For example, T cells may be isolated from a patient by routine techniques (such as by Ficoll/Hypaque density gradient centrifugation of peripheral blood lymphocytes). T cells may be incubated in vitro for 2-9 days (typically 4 days) at 37° C. with one or more representative polypeptides (e.g., 5-25 μg/ml). It may be desirable to incubate another aliquot of a T cell sample in the absence of colon tumor polypeptide to serve as a control. For CD4⁺ T cells, activation is preferably detected by evaluating proliferation of the T cells. For CD8⁺ T cells, activation is preferably detected by evaluating cytolytic activity. A level of proliferation that is at least two fold greater and/or a level of cytolytic activity that is at least 20% greater than in disease-free patients indicates the presence of a cancer in the patient.

[1268] As noted above, a cancer may also, or alternatively, be detected based on the level of mRNA encoding a colon tumor protein in a biological sample. For example, at least two oligonucleotide primers may be employed in a polymerase chain reaction (PCR) based assay to amplify a portion of a colon tumor cDNA derived from a biological sample, wherein at least one of the oligonucleotide primers is specific for (i.e., hybridizes to) a polynucleotide encoding the colon tumor protein. The amplified cDNA is then separated and detected using techniques well known in the art, such as gel electrophoresis. Similarly, oligonucleotide probes that specifically hybridize to a polynucleotide encoding a colon tumor protein may be used in a hybridization assay to detect the presence of polynucleotide encoding the tumor protein in a biological sample.

[1269] To permit hybridization under assay conditions, oligonucleotide primers and probes should comprise an oligonucleotide sequence that has at least about 60%, preferably at least about 75% and more preferably at least about 90%, identity to a portion of a polynucleotide encoding a colon tumor protein that is at least 10 nucleotides, and preferably at least 20 nucleotides, in length. Preferably, oligonucleotide primers and/or probes will hybridize to a polynucleotide encoding a polypeptide disclosed herein under moderately stringent conditions, as defined above. Oligonucleotide primers and/or probes which may be usefully employed in the diagnostic methods described herein preferably are at least 10-40 nucleotides in length. In a preferred embodiment, the oligonucleotide primers comprise at least 10 contiguous nucleotides, more preferably at least 15 contiguous nucleotides, of a DNA molecule having a sequence recited in SEQ ID NO: 1-121, 123-197, 205-630, 632-684, 686, 690-691, 694-1058, 1069, 1071-1076, 1082, 1084, 1086, 1092, 1094, 1096-1101, 1103-1106, 1111-1114, 1119, and 1120. Techniques for both PCR based assays and hybridization assays are well known in the art (see, for example, Mullis et al., Cold Spring Harbor Symp. Quant. Biol., 51:263, 1987; Erlich ed., PCR Technology, Stockton Press, NY, 1989).

[1270] One preferred assay employs RT-PCR, in which PCR is applied in conjunction with reverse transcription. Typically, RNA is extracted from a biological sample, such as biopsy tissue, and is reverse transcribed to produce cDNA molecules. PCR amplification using at least one specific primer generates a cDNA molecule, which may be separated and visualized using, for example, gel electrophoresis. Amplification may be performed on biological samples taken from a test patient and from an individual who is not afflicted with a cancer. The amplification reaction may be performed on several dilutions of cDNA spanning two orders of magnitude. A two-fold or greater increase in expression in several dilutions of the test patient sample as compared to the same dilutions of the non-cancerous sample is typically considered positive.

[1271] In another embodiment, the disclosed compositions may be used as markers for the progression of cancer. In this embodiment, assays as described above for the diagnosis of a cancer may be performed over time, and the change in the level of reactive polypeptide(s) or polynucleotide evaluated. For example, the assays may be performed every 24-72 hours for a period of 6 months to 1 year, and thereafter performed as needed. In general, a cancer is progressing in those patients in whom the level of polypeptide or polynucleotide detected increases over time. In contrast, the cancer is not progressing when the level of reactive polypeptide or polynucleotide either remains constant or decreases with time.

[1272] Certain in vivo diagnostic assays may be performed directly on a tumor. One such assay involves contacting tumor cells with a binding agent. The bound binding agent may then be detected directly or indirectly via a reporter group. Such binding agents may also be used in histological applications. Alternatively, polynucleotide probes may be used within such applications.

[1273] As noted above, to improve sensitivity, multiple colon tumor protein markers may be assayed within a given sample. It will be apparent that binding agents specific for different proteins provided herein may be combined within a single assay. Further, multiple primers or probes may be used concurrently. The selection of tumor protein markers may be based on routine experiments to determine combinations that results in optimal sensitivity. In addition, or alternatively, assays for tumor proteins provided herein may be combined with assays for other known tumor antigens.

[1274] Diagnostic Kits

[1275] The present invention further provides kits for use within any of the above diagnostic methods. Such kits typically comprise two or more components necessary for performing a diagnostic assay. Components may be compounds, reagents, containers and/or equipment. For example, one container within a kit may contain a monoclonal antibody or fragment thereof that specifically binds to a colon tumor protein. Such antibodies or fragments may be provided attached to a support material, as described above. One or more additional containers may enclose elements, such as reagents or buffers, to be used in the assay. Such kits may also, or alternatively, contain a detection reagent as described above that contains a reporter group suitable for direct or indirect detection of antibody binding.

[1276] Alternatively, a kit may be designed to detect the level of mRNA encoding a colon tumor protein in a biological sample. Such kits generally comprise at least one oligonucleotide probe or primer, as described above, that hybridizes to a polynucleotide encoding a colon tumor protein. Such an oligonucleotide may be used, for example, within a PCR or hybridization assay. Additional components that may be present within such kits include a second oligonucleotide and/or a diagnostic reagent or container to facilitate the detection of a polynucleotide encoding a colon tumor protein.

[1277] The following Examples are offered by way of illustration and not by way of limitation.

### EXAMPLES

### Example 1

### Isolation and Characterization 0f Colon Tumor Polypeptides by PCR-Based Subtraction and Microarray Analysis

[1278] A cDNA library was constructed in the PCR2. 1 vector (Invitrogen, Carlsbad, Calif.) by subtracting a pool of three colon tumors with a pool of normal colon, spleen, brain, liver, kidney, lung, stomach and small intestine using PCR subtraction methodologies (Clontech, Palo Alto, Calif.). The subtraction was performed using a PCR-based protocol, which was modified to generate larger fragments. Within this protocol, tester and driver double stranded cDNA were separately digested with five restriction enzymes that recognize six-nucleotide restriction sites (MluI, MscI, PvuII, SalI and Stul). This digestion resulted in an average cDNA size of 600 bp, rather than the average size of 300 bp that results from digestion with RsaI according to the Clontech protocol. This modification did not affect the subtraction efficiency. Two tester populations were then created with different adapters, and the driver library remained without adapters.

[1279] The tester and driver libraries were then hybridized using excess driver cDNA. In the first hybridization step, driver was separately hybridized with each of the two tester cDNA populations. This resulted in populations of (a) unhybridized tester cDNAs, (b) tester cDNAs hybridized to other tester cDNAs, (c) tester cDNAs hybridized to driver cDNAs, and (d) unhybridized driver cDNAs. The two separate hybridization reactions were then combined, and rehybridized in the presence of additional denatured driver cDNA. Following this second hybridization, in addition to populations (a) through (d), a fifth population (e) was generated in which tester cDNA with one adapter hybridized to tester cDNA with the second adapter. Accordingly, the second hybridization step resulted in enrichment of differentially expressed sequences which could be used as templates for PCR amplification with adaptor-specific primers.

[1280] The ends were then filled in, and PCR amplification was performed using adaptor-specific primers. Only population (e), which contained tester cDNA that did not hybridize to driver cDNA, was amplified exponentially. A second PCR amplification step was then performed, to reduce background and further enrich differentially expressed sequences.

[1281] This PCR-based subtraction technique normalizes differentially expressed cDNAs so that rare transcripts that are over-expressed in colon tumor tissue may be recoverable. Such transcripts would be difficult to recover by traditional subtraction methods.

[1282] To characterize the complexity and redundancy of the subtracted library, 96 clones were randomly picked and 65 were sequenced, as previously described. These sequences were further characterized by comparison with the most recent Genbank database (April, 1998) to determine their degree of novelty. No significant homologies were found to 21 of these clones, hereinafter referred to as 11092, 11093, 11096, 11098, 11103, 11174, 11108, 11112, 11115, 11117, 11118, 11134, 11151, 11154, 11158, 11168, 11172, 11175, 11184, 11185 and 11187. The determined cDNA sequences for these clones are provided in SEQ ID NO: 48, 49, 52, 54, 59, 60, 65-69, 79, 89, 90, 93, 99-101 and 109-111, respectively.

[1283] Two-thousand clones from the above mentioned cDNA subtraction library were randomly picked and submitted to a round of PCR amplification. Briefly, 0.5 μl of glycerol stock solution was added to 99.5 μl of pcr MIX (80 μl H₂O, 10 μl 10×PCR Buffer, 6 μl 25 mM MgCl₂, 1 μl 10 mM dNTPs, 1 μl 100 mM M13 forward primer (CACGACGTTGTAAAACGACGG), 1 μl 100 mM M13 reverse primer (CACAGGAAACAGCTATGACC)), and 0.5 μl 5 μ/ml Taq polymerase (primers provided by (Operon Technologies, Alameda, Calif.). The PCR amplification was run for thirty cycles under the following conditions: 95° C. for 5 min., 92° C. for 30 sec., 57° C. for 40 sec., 75° C. for 2 min. and 75° C. for 5 minutes.

[1284] mRNA expression levels for representative clones were determined using microarray technology (Synteni, Palo Alto, Calif.) in colon tumor tissues (n=25), normal colon tissues (n=6), kidney, lung, liver, brain, heart, esophagus, small intestine, stomach, pancreas, adrenal gland, salivary gland, resting PBMC, activated PBMC, bone marrow, dendritic cells, spinal cord, blood vessels, skeletal muscle, skin, breast and fetal tissues. The number of tissue samples tested in each case was one (n=1), except where specifically noted above; additionally, all the above-mentioned tissues were derived from humans. The PCR amplification products were dotted onto slides in an array format, with each product occupying a unique location in the array. mRNA was extracted from the tissue sample to be tested, and fluorescent-labeled cDNA probes were generated by reverse transcription according to the protocol provided by Synteni. The microarrays were probed with the labeled cDNA probes, the slides scanned, and fluorescence intensity was measured. This intensity correlates with the hybridization intensity.

[1285] One hundred and forty nine clones showed two or more fold over-expression in the colon tumor probe group as compared to the normal tissue probe group. These cDNA clones were further characterized by DNA sequencing with a Perkin Elmer/Applied Biosystems Division Automated Sequencer Model 373A and/or Model 377 (Foster City, Calif.). These sequences were compared to known sequences in the most recent GenBank database. No significant homologies to human gene sequences were found in forty nine of these clones, represented by the following sixteen cDNA consensus sequences: SEQ ID NO: 2, 8, 15, 16, 22, 24, 30, 32-34, 36, 38, 40, 41, 46 and 47, hereinafter referred to as Contig 2, 8, 13, 14, 20, 23, 29, 31, 35, 32, 36, 38, 41, 42, 50 and 51, respectively). Contig 29 (SEQ ID NO: 30) was found to be a Rat GSK-3-β-interacting protein Axil homolog. Also, Contigs 31 and 35 (SEQ ID NO: 32 and 33, respectively) were found to be a Mus musculus GOB-4 homolog. The determined cDNA sequences of SEQ ID NO: 1, 3-7, 9-14, 17-21, 23, 25-29, 31, 35, 37, 39, 42-45, 50, 51, 53, 55-58, 61-64, 70-78, 80-88, 91, 92, 94-98, 102-108 and 112 were found to show some homology to previously identified genes sequences.

[1286] Microarray analysis demonstrated Contig 2 (SEQ ID NO: 2) showed over-expression in 34% of colon tumors tested, as well as increased expression in normal pancreatic tissue, with no over-expression in normal colon tissues. Upon further analysis, Contigs 2, 8 and 23 were found to share homology to the known gene GW112. Contigs 4, 5, 9 and 52 showed homology to carcinoembryonic antigen (SEQ ID NO: 3, 4, 5 and 6, respectively). A representative sampling of these fragments showed over-expression in 85% of colon tumors, with over-expression in normal bone marrow and 3/6 normal colon tissues. Contig 6 (SEQ ID NO: 7), showing homology to the known gene sequence for villin, and was over-expressed in about half of all colon tumors tested, with a limited degree of low level over-expression in normal colon. Contig 12 (SEQ ID NO: 14), showing homology to Chromosome 17, clone hRPC.1171_I_{—}10, also referred to as C798P, was over-expressed in approximately 70% of colon tumors tested, with low over-expression in 1/6 normal colon samples. Contig 14, also referred to as 14261 (SEQ ID NO: 16), showing no significant homology to any known gene, showed over-expression in 44% of colon tumors tested, with low level expression in half of normal colon tissues, as well as small intestine and pancreatic tissue. Contig 18 (SEQ ID NO: 21), showing homology to the known gene for L1-cadherin, showed over-expression in approximately half of colon tumors and low level over-expression in 3/6 normal colon tissues tested. Contig 22 (SEQ ID NO: 23), showing homology to Bumetanide-sensitive Na—K—Cl cotransporter was over-expressed in 70% of colon tumors and no over-expression in all normal tissues tested. Contig 25 (SEQ ID NO: 25), showing homology to macrophage inflammatory protein-3α, was over-expressed in over 40% of colon tumors and in activated PBMC. Contigs 26 and 48 (SEQ ID NOS: 25 and 26), showing homology to the sequence for laminin, was over-expressed in 48% of colon tumors and with low over-expression in stomach tissue. Contig 28 (SEQ ID NO: 29), showing homology to the known gene sequence for Chromosome 16 BAC clone CIT987SK-A-363E6, was over-expressed in 33% of colon tumors tested with normal stomach and 2/6 normal colon tissues showing low level over-expression. Contigs 29, 31 and 35 (SEQ ID NOS: 30, 32 and 33, respectively), also referred to as C751P, an unknown sequence showing limited and partial homology to Rat GSK-3p-interacting protein Axil homolog and Mus musculus GOB-4 homolog, was over-expressed in 74% of colon tumors and no over-expression in all normal tissues tested. Contig 34 (SEQ ID NO: 35), showing homology to the known sequence for desmoglein 2, was over-expressed in 56% of colon tumors and showed low level over-expression in 1/6 normal colon tissues. Contig 36 (SEQ ID NO: 36), an unknown sequence also referred to as C793P, showed over-expression in 30% of colon tumor tissues tested. Contig 37 and 14287.2 (SEQ ID NOS: 37 and 116), an unknown sequence, but with limited (89%) homology to the known sequence for putative transmembrane protein was over-expressed in 70% of colon tumors, as well as in normal lung tissue and 3/6 normal colon tissues tested. Contig 38, also referred to as C796P and 14219 (SEQ ID NO: 38), showing no significant homology to any known gene, was over-expressed in 38% in colon tumors and no elevated over-expression in any normal tissues. Contig 41 (SEQ ID NO: 40), also referred to as C799P and 14308, an unknown sequence showing no significant homology to any known gene, was over-expressed in 22% of colon tumors. Contig 42, (SEQ ID NO: 41), also referred to as C794P and 14309, an unknown sequence with no significant homology to any known gene, was over-expressed in 63% of colon tumors tested, as well as in 3/6 normal colon tissues. Contig 43 (SEQ ID NO: 42), showing homology to the known sequence for Chromosome 1 specific transcript KIAA0487 was over-expressed in 85% of colon tumors tested and in normal lung and 4/6 normal colon tissues. Contig 49 (SEQ ID NO: 45), showing homology to the known sequence for pump-1, was over-expressed in 44% of colon tumors and no over-expression in all normal tissues tested. Contig 50 (SEQ ID NO: 46), also referred to as C792P and 18323, showing no significant homology to any known gene, was over-expressed in 33% of colon tumors with no detectable over-expression in any normal tissues tested. Contig 51 (SEQ ID NO: 47), also referred to as C795P and 14317 was over-expressed in 11% of colon tumors.

[1287] Additional microarray analysis yielded seven clones showing two or more fold over-expression in the colon tumor probe group as compared to the normal tissue probe group. Three of these clones demonstrated particularly good colon tumor specificity, and are represented by SEQ ID NO: 115, 116 and 120. Specifically, SEQ ID NO: 115, referred to as C791P or 14235, which shows homology to the known gene sequence for H. sapiens chromosome 21 derived BAC containing ets-2 gene, was over-expressed in 89% of colon tumors tested and in 5/6 normal colon tissues, as well as over-expressed at low levels in normal lung and activated PBMC. Microarray analysis for SEQ ID NO: 116 is discussed above. SEQ ID NO: 120, referred to as 14295, showing homology to the known gene sequence for secreted cement gland protein XAG-2 homolog, was over-expressed in 70% of colon tumors and in 5/6 normal colon tissues, as well as low level over-expression in normal small intestine, stomach and lung. All clones showing over-expression in colon tumor were sequenced and these sequences compared to the most recent Genbank database (Feb. 12, 1999). Of the seven clones, three contained sequences that did not share significant homology to any known gene sequences, represented by SEQ ID NO: 116, 117 and 119. To the best of the inventors' knowledge, none of these sequences have been previously shown to be present in colon. The determined cDNA sequences of the remaining clones (SEQ ID NO: 113-115 and 120) were found to show some homology to previously identified genes.

[1288] Further analysis identified a clone which was recovered several times by PCR subtraction and by expression screening using a mouse anti-scid antiserum. The determined full length cDNA sequence for this clone is provided in SEQ ID NO: 121, with the corresponding predicted amino acid sequence being provided in SEQ ID NO: 122. This clone is homologous with the known gene Beta IG-H3, as disclosed in U.S. Pat. No. 5,444,164. Microarray analysis demonstrated this clone to be over-expressed in 75 to 80% of colon tumors tested (n=27), with no over-expression in normal colon samples (n=6), but with some low level over-expression in other normal tissues tested.

[1289] Further analysis of the PCR-subtraction library described above led to the isolation of longer cDNA sequences for the clones of SEQ ID NO: 30, 115, 46, 118, 41, 47, 38, 113, 14 and 40 (known as C751P, C791P, C792P, C793P, C794P, C795P, C796P, C797P, C798P and C799P, respectively). These determined cDNA sequences are provided in SEQ ID NO: 123-132, respectively. Additional sequences for the clones C794P and C799P are shown in SEQ ID NO: 683 and 684, respectively, and the predicted amino acid sequences are shown in SEQ ID NO: 685 and 686, respectively. Still further sequences for the clones C794P and C799P are shown in SEQ ID NO: 691 and 690, respectively, and to the predicted amino acid sequence as shown in SEQ ID NO: 693 and 692, respectively.

[1290] Using PCR subtraction methodology described above with minor modifications, transcripts from a pool of three moderately differentiated colon adenocarcinoma samples were subtracted with a set of transcripts from normal brain, pancreas, bone marrow, liver, heart, lung, stomach and small intestine. Modifications of the above protocol were included at the cDNA digestion steps and in the tester to drive hybridization ratios. In a first subtraction, the restriction enzymes PvuII, DraI, MscI and StuI were used to digest cDNAs, and the tester to driver ratio was 1:40, as suggested by Clontech. In a second subtraction, DraI, MscI and StuI were used for cDNA digestion and a tester to driver ratio of 1:76 was used. Following the PCR amplification steps, the cDNAs were clones into pCR2.1 plasmid vector. The determined cDNA sequences of 167 isolated clones are provided in SEQ ID NO: 205-371. These sequences were compared to sequences in the public databases as described above. The sequences of SEQ ID NO: 205, 207, 210-212, 214, 215, 218, 224-226, 228, 233, 234, 236, 238, 241, 242, 245, 246, 248, 250, 253, 254, 256, 259, 260, 262, 263, 266, 267, 270-273, 279, 282, 291, 293, 294, 298, 300, 302, 303, 310-313, 315, 317, 320, 322, 324, 332-335, 345, 347, 356, 358, 361, 362, 366, 369 and 371 were found to show some homology to previously identified ESTs. The remaining sequences were found to show some homology to previously identified genes.

[1291] Using the PCR subtraction technology described above, a cDNA library from a pool of primary colon tumors was subtracted with a cDNA library prepared from normal tissues, including brain, bone marrow, kidney, heart, lung, liver, pancreas, small intestine, stomach and trachea. The determined cDNA sequences for 90 clones isolated in this subtraction are provided in SEQ ID NO: 372-461. Comparison of these sequences with those in the public databases as described above, revealed no homologies to the sequences of SEQ ID NO: 426, 445 and 453. The sequences of SEQ ID NO: 372-378, 380-404, 406, 409-417, 419-423, 425, 427-429, 433-436, 438-441, 443, 446-451, 454, 455 and 457-461 showed some homology to previously identified genes, while the sequences of SEQ ID NO: 379, 405, 407, 408, 418, 424, 430-432, 437, 442, 444, 452 and 456 showed some homology to previously isolated ESTs.

[1292] Using the PCR subtraction methodology described above, a cDNA library prepared from a pool of metastatic colon tumors was subtracted with cDNA from a pool of normal tissues, namely brain, heart, lung, lymph nodes, PBMC, pancreas, small intestine and stomach. The determined cDNA sequences for 82 clones isolated from the subtracted library are provided in SEQ ID NO: 487-568 (referred to as contigs 1-56 and 58-83, respectively). The sequences of SEQ ID NO: 487, 489, 490, 493-496, 499, 501-509, 511-518, 520-526, 529-542, 544, 546, 548-552, 554, 555, 557, 558, 560, 562, 563, 566 and 567 showed some homology to previously identified gene sequences. The sequences of SEQ ID NO: 488, 491, 492, 497, 498, 500, 510, 519, 527, 528, 543, 545, 547, 553, 559, 564, 564 and 568 showed some homology to previously isolated ESTs.

### Example 2

### Isolation of Tumor Polypeptides Using SCID Mouse-Passaged Tumor RNA

[1293] This Example discloses the preparation of antisera against shed/secreted antigens from SCID mice bearing human colon tumors. These antisera may be useful, for example, in the screening of cDNA libraries made from the original human colon tumors for secreted antigens that may, in turn, be useful for identification of therapeutic and/or diagnostic candidates.

[1294] Human colon tumor antigens were obtained using SCID mouse passaged colon tumor RNA as follows. Human colon tumor was implanted in SCID mice and harvested, as described in patent application Ser. No. 08/556,659 filed Nov. 13, 1995 U.S. Pat. No. 5,986,170. First strand cDNA was synthesized from poly A+ RNA from three SCID mouse-passaged colon tumors using a Lambda ZAP Express cDNA synthesis kit (Stratagene). The reactions were pooled and digested with RNase A, T1 and H to cleave the RNA and then treated with NaOH to degrade the RNA. The resulting cDNA was annealed with biotinylated (Vector Labs, Inc., Burlingame, Calif.) cDNA from a normal resting PBMC plasmid library (constructed from Superscript plasmid System, Gibco BRL), and subtracted with streptavidin by phenol/chloroform extraction. Second strand cDNA was synthesized from the subtracted first strand cDNA and digested with S1 nuclease (Gibco BRL). The cDNA was blunted with Pfu polymerase and EcoRI adaptors (Stratagene) were ligated to the ends. The cDNA was phosphorylated with T4 polynucleotide kinase, digested with restriction endonuclease XhoI, and size selected with Sephacryl S-400 (Sigma). Fractions were pooled, ligated to Lambda ZAP Express arms (Stratagene) and packaged with Gigapack Gold III extract (Stratagene). Random plaques were picked, phagemid was excised, transformed into XLOLR cells (Stratagene) and resulting plasmid DNA (Qiagen Inc., Valencia, Calif.) was sequenced as described above.

[1295] The determined cDNA sequences for 17 clones isolated as described above are provided in SEQ ID NO: 133-151, wherein 133 and 134 represent partial sequences of a clone referred to as CoSub-3 and SEQ ID NO: 135 and 136 represent partial sequences of a clone referred to as CoSub-13. These sequences were compared with those in the public databases as described above. The sequences of SEQ ID NO: 139 and 149 showed no significant homologies to any previously identified sequences. The sequences of SEQ ID NO: 138, 140, 141, 142, 143, 148 and 149 showed some homology to previously isolated expressed sequence tags (ESTs). The sequences of SEQ ID NO: 133-137, 144-147, 150 and 151 showed some homology to previously isolated gene sequences.

[1296] The determined cDNA sequences for an additional 46 clones isolated as described above, are provided in SEQ ID NO: 569-616, wherein SEQ ID NO: 573 and 574 represent the 3′ and 5′ determined cDNA sequences, respectively, for clone CS1-106, and SEQ ID NO: 579 and 580 represent the determined 3′ and 5′ cDNA sequences, respectively, for clone CS1-124. Comparison of the isolated sequences with those in the public databases revealed no significant homologies to the sequences of SEQ ID NO: 580, 585, 610 and 613. The sequences of SEQ ID NO: 569, 574-577, 584, 587, 592, 595, 598, 603 and 608 showed some homology to previously isolated ESTs, while the sequences of SEQ ID NO: 570-573, 578, 581-583, 586, 588-591, 593, 594, 596, 597, 599-602, 604-607, 609, 611, 612 and 514-616 showed some homology to previously isolated gene sequences.

### Example 3

### Use of Mouse Antisera to Identify DNA Sequences Encoding Colon Tumor Antigens

[1297] This example illustrates the isolation of cDNA sequences encoding colon tumor antigens by screening of colon tumor cDNA libraries with mouse anti-tumor sera.

[1298] A cDNA expression library was prepared from SCID mouse-passaged human colon tumor poly A+ RNA using a Stratagene (La Jolla, Calif.) Lambda ZAP Express kit, following the manufacturer's instructions. Sera was obtained from the colon tumor-bearing SCID mouse. This serum was injected into normal mice to produce anti-colon tumor serum. Approximately 600,000 PFUs were screened from the unamplified library using this antiserum. Using a goat anti-mouse IgG-A-M (H+L) alkaline phosphatase second antibody developed with NBT/BCIP (BRL Labs.), positive plaques were identified. Phage was purified and phagemid excised for several clones with inserts in a pBK-CMV vector for expression in prokaryotic or eukaryotic cells.

[1299] The determined cDNA sequences for 46 of the isolated clones are provided in SEQ ID NO: 152-197. The predicted amino acid sequences for the cDNA sequences of SEQ ID NO: 187, 188, 189, 190, 194, 195 and 197 are provided in SEQ ID NO: 198-204, respectively. The determined cDNA sequences were compared with those in the public database as described above. The sequences of SEQ ID NO: 156, 168, 184, 189, 192 and 196 showed some homology to previously isolated ESTs. The sequences of SEQ ID NO: 152-155, 157-167, 169-182, 183, 185-188, 190, 194, 195 and 197 showed some homology to previously identified genes.

[1300] The determined cDNA sequences for an additional eleven clones isolated as described above, are provided in SEQ ID NO: 617-627. Comparison of these sequences with those in the public database as described above revealed no known homologies to SEQ ID NO: 621 and 623. The sequences of SEQ ID NO: 622 and 626 were found to show some homology to previously isolated ESTs, while the sequences of SEQ ID NO: 617-620, 624, 625 and 627 showed some homology to previously identified genes.

[1301] In further studies, a cDNA library was prepared from SCID-mouse grown colon tumors and screened with mouse anti-SCID serum as described above. Briefly first strand cDNA was synthesized from poly A+ RNA from three SCID mouse-grown human colon tumors using a Lambda ZAP Express cDNA synthesis kit (Stratagene). The reactions were pooled and digested with RNase A, T1 and H to cleave the RNA and then treated with NaOH to degrade the RNA. The cDNA was annealed with biotinylated cDNA from a normal resting PBMC plasmid library (constructed from Superscript plasmid system; Gibco BRL) and subtracted with streptavidin by phenol/chloroform extraction. Second strand cDNA was synthesized from the subtracted first strand cDNA and digested with S1 nuclease. The cDNA was blunted with Pfu polymerase and EcoRI adaptors were ligated to the ends. The cDNA was phosphorylated with T4 polynucleotide kinase, digested with restriction endonuclease XhoI, and size selected with Sephacryl S-400 (Sigma). Fractions were pooled, ligated to Lambda ZAP Express arms (Stratagene) and packaged with Gigapack Gold III extract (Stratagene). The resulting library was screened with a mouse antiserum raised against serum from SCID mice containing human colon tumors, including the three tumors used to prepare the cDNA libraries.

[1302] The determined cDNA for one clone isolated using this procedure is provided in SEQ ID NO: 630. This clone was found to show homology to a previously identified gene. The amino acid sequence encoded by the clone of SEQ ID NO: 630 is provided in SEQ ID NO: 631.

[1303] In subsequent studies, an additional cDNA library was prepared from a SCID-passaged human colon tumor and screened with a mouse antiserum raised against serum from the SCID mouse containing the colon tumor. The determined cDNA sequences for 51 clones isolated in these studies are provided in SEQ ID NO: 632-682. Comparison of these sequences with those in the public databases revealed no significant homologies to the sequences of SEQ ID NO: 648 and 668. The sequence of SEQ ID NO: 642 showed some homology to previously isolated ESTs. The sequences of SEQ ID NO: 632-641, 643-647, 649-667 and 669-682 were found to show some homology to previously identified genes. SEQ ID NO: 684 and SEQ ID NO: 690 showed homology to human NADH/NADPH thyroid oxidase p138-tox mRNA.

### Example 4

### Isolation and Characterization of Colon Tumor Polypeptides by Conventional Subtraction

[1304] wo cDNA libraries were constructed and used to create a subtracted cDNA library as follows.

[1305] Using the GibcoBRL Superscript Plasmid System with minor modifications, two cDNA libraries were created. The first library, referred to as CTCL, was prepared from a pool of mRNA samples from three colon adenocarcinoma tissue samples. Two of the samples were described as Duke's stage C. and one as Duke's stage B. All three samples were grade III in histological status. A second library (referred to as DriverLibpcDNA3.1+) was prepared from a pool of normal tissues, namely liver, pancreas, skin, bone marrow, resting PBMC, stomach and brain. Both libraries were prepared using the manufacturer's instructions with the following modifications: an EcoRI-NotI 5′ cDNA adapter was used instead of the provided reagent; the vector pCDNA3.1 (+) (Invitrogen) was substituted for the pSPORT vector; and the ligated DNA molecules were transformed into ElectroMaxDH10B electrocompetent cells. Clones from the libraries were analyzed by restriction digest and sequencing to determine average insert size, quality of the library and complexity of the library. DNA was prepared from each library and digested.

[1306] The driver DNA was biotinylated and hybridized with the colon library tester DNA at a ratio of 10:1. After two rounds of hybridizations, streptavidin incubations and extractions, the remaining colon cDNAs were size-selected by column chromatography and cloned into the pCMV-Script vector from Stratagene. Clones from this subtracted library (referred to as CTCL-S1) were characterized as described above for the unsubtracted libraries.

[1307] The determined cDNA sequences for 20 clones isolated from the CTCL-S 1 library are provided in SEQ ID NO: 462-479, 628 and 629. Comparison of these sequences with those in the public databases, as described above, revealed no significant homologies to the sequences of SEQ ID NO: 476, 477 and 479. The remaining sequences showed some homology to previously identified genes.

[1308] In further studies, a cDNA library was prepared from a pool of mRNA from three metastatic colon adenocarcinomas derived from liver tissue samples. All samples were described as Duke's stage D. Conventional subtraction was performed as described above, using the DriverLibpcDNA3.1+ library described above as the driver. The resulting subtracted library (referred to as CMCL-S1) was characterized by isolating a set of clones for restriction analysis and sequencing.

[1309] The determined cDNA sequences for 7 clones isolated from the CMCL-S1 library are provided in SEQ ID NO: 480-486. Comparison of these sequences with those in the public databases revealed no significant homologies to the sequence of SEQ ID NO: 483. The sequences of SEQ ID NO: 480-482 and 484-486 were found to show some homology to previously identified genes.

### Example 5

### Expression of RA12-C884P Fusion Protein in E. COLI

[1310] PCR was used to amplify the C884P cDNA (SEQ ID NO: 1052) using the primers below and a colon cDNA library (648A). The PCR product was cloned to pCRX2 at EcoR I and Xho I site, downstream of 130 amino acid segment of the Ra12 protein. Three clones (Clone Identifier NO: 61698, 61699 and 61700) were all confirmed by DNA sequence. The cDNA encoding the Ra12-C884P fusion is set forth in SEQ ID NO: 1084 and the corresponding predicted amino acid sequence is disclosed in SEQ ID NO: 1085.

[1311] The following primers were used for PCR amplification of C884P:

[1312] 080300-A (Primer Identifier 7839) (SEQ ID NO: 1088):

[1313] 5′-cgagcgaattcatatgggtacgagtaagcaatg-3′ (5′ Eco RI site).

[1314] 080300-B (Primer ID 7840) (SEQ ID NO: 1089):

[1315] 5′-gcgatgcctcgagttatttgttcccgatctggc-3′ (3′ Xho I site).

[1316] The predicted protein has the following features: Protein sequence information: Molecular Weight 36466.18 Daltons; 344 Amino Acids; 21 Strongly Basic (+) Amino Acids (K,R); 27 Strongly Acidic (−) Amino Acids (D,E); 144 Hydrophobic Amino Acids (A,I,L,F,W,V); 88 Polar Amino Acids (N,C,Q,S,T,Y); 6.165 Isolectric Point; −4.709 Charge at PH 7.0.

[1317] Mini-induction screening of Ra12-C884P in numerous E. coli hosts, using various temperature, culture media and concentrations of IPTG, showed a protein band at expected MW of 36.5 kDa, visible by western blot but not by SDS-PAGE/Coomassie staining. The best expression condition was in BLR(DE3)pLysS host and recombinant protein induced by IPTG at 30° C. for 2 hours.

### Example 6

### Expression of RA12-C888P Fusion Protein in E. COLI

[1318] PCR was used to amplify the ORF of C888P (SEQ ID NO: 1076; Clone Identifier No: 37983) from a colon cDNA library (648A) using the following primers:

[1319] Sense Primer -080300-C (Primer ID7841) (SEQ ID 1090):

[1320] 5′-gcatgcatgcggccgcacaagaggggaagtttagtgg-3′ (5′ Not I site)

[1321] Antisense Primer-080300-D (Primer ID7842) (SEQ ID NO: 1091):

[1322] 5′-gcgatgcctcgagtcagcttctcagaggtttgacttc-3′ (3′ Xho I site)

[1323] The PCR product was cloned into the pZeroBlunt vector (Invitrogen, Carlsbad, Calif.) and confirmed by DNA sequencing. The C888P insert was cut with Not I and Xho I and subcloned into pCRX2 linearized with the same two enzymes. A clone (clone identifier 66481) was confirmed by DNA sequencing. The cDNA sequence encoding the Ra12-C888P fusion protein (R.C888P) is disclosed in SEQ ID NO: 1086 and the corresponding predicted amino acid sequence is disclosed in SEQ ID NO: 1087.

[1324] The predicted R.C888P protein has the following features: molecular weight 104429.77 Daltons; 958 Amino Acids; 78 Strongly Basic(+) Amino Acids (K,R); 116 Strongly Acidic(−) Amino Acids (D,E); 331 Hydrophobic Amino Acids (A,I,L,F,W,V); 260 Polar Amino Acids (N,C,Q,S,T,Y); 4.985 Isolectric Point: −34.173 Charge at PH 7.0

[1325] Multiple “mini” expression screens were performed to determine the optimal induction conditions. E. coli expression hosts were tested in various culture conditions, with notable full length expression but also multiple breakdown products. To test for reduction of breakdown product and maximize clean recombinant production, Tuner (DE3) C+RIL and C+RP cells were induced at varied IPTG concentrations. Coomassie stained SDS-PAGE showed a specifically induced band at about 100 kD and western blot confirmed with anti-6×his tag Ab. Western blot also showed no breakdown products at 0.1 mM IPTG concentration. Tuner (DE3) C+RP expression host grows best (high cell density) with optimal expression of R.C888P in 2×YS media at 25° C. induced with 0.1 mM IPTG at 25° C. for 3 hr.

### Example 7

### Database Analysis of C794P CDNA Encoding Colon Tumor Protein

[1326] Database searches were performed with C794P (SEQ ID NOs: 41, 127, 683, 691). Sequence similarity was seen to cDNA FLJ20063 and the RECC gene (SEQ ID NO: 1092). This RECC sequence is longer than the FLJ20063 cDNA, containing additional sequence at the 5′ end. The RECC sequence contains an ORF encoding a predicted protein of 512 amino acids (SEQ ID NO: 1093). This RECC protein shares similarity with mouse cell surface antigen 114/A10. This mouse antigen was found in a hematopoetic progenitor cell line and is described as an intergral membrane protein with serine/threonine repeats at the N-terminus and 3 EGF-like cysteine repeats. It was also detected in a leukemia cell line and IL-3-dependent cell lines (J. Biol. Chem. 1989. 264(11):6509-6514).

[1327] Results from the PSORTII protein analysis program (University of California-Berkeley, Berkeley, Calif.) suggest that RECC is a cell surface protein containing 1 transmembrane domain. PSORTII predicts a cleavable signal peptide from amino acids 1-17, one transmembrane domain, a C-terminal cytoplasmic tail, amino acids 446-512, and a 44.4% likelihood of extracellular localization. The IDENTIFY analysis program (Stanford University, Palo Alto, Calif.) predicts four EGF-type signatures CACVPGY and one rhesus blood group protein signature at stringency of one in 10⁶ (no false positives expected).

### Example 8

### Microarray Expression Analysis of CDNAS Encoding Colon Tumor Polypeptides Isolated From a Serological Expression Library

[1328] mRNA expression levels of cDNA clones identified in the serological expression library described in Example 3 were analyzed by microarray as described in Example 1. Those clones with expression levels 2 fold or higher in tumor tissues as compared to normal tissues were further characterized by comparison with the most recent Genbank database. Those sequences that showed some degree of similarity to sequences in the database are summarized in Table 1. Those sequences that showed no significant similarity to known sequences in the database are summarized in Table 2. Disclosed herein are several full length cDNA and predicted amino acid sequences for genes provided in the results of Genbank searches. The full length cDNA sequences are set forth in SEQ ID NOs: 1096-1099, 1101, 1103-1106, and 1111-1114, and the full length predicted amino acid sequences are set forth in 1102, 1107-1110, and 1115-1118. The clone, CT2-222, showed the most similarity to a murine gene (disclosed in SEQ ID NOs: 1113 (cDNA) and 1117 (amino acid)). The human homolog of this gene is disclosed in SEQ ID NOs: 1114 (cDNA) and 1118 (amino acid).

TABLE 1
Microarray and Genbank search analysis of cDNAs isolated from a serological expression library:
Sequences that showed some similarity to sequences in Genbank

| | | | | Ratio of Median Values | | | | | | |
|---|---|---|---|---|---|---|---|---|---|---|
| | | | | Tumor/Normal Tissue | | | | | | |
| SEQ | Clone | Sequence | | | | | | | | |
| ID NO: | Name | Identifier | GenBank ID | T/N | DA/N | DB/N | DC/N | DD/N | Met* | T/N-C |
| 171, | CT-53 | 24132 | Galectin-4 (secreted) | 3.2 | 2.4 | 5.4 | 2.1 | 4.5 | | 3.5 |
| 1096 | | | | | | | | | | |
| 181, | CT-126 | 25527 | GPI-anch. Surface mark 1 | — | — | 2.3 | — | — | | 2.4 |
| 1097 | | | | | | | | | | |
| 183, | CT-140 | 25537 | hAG-2/C (hAG-1)(secreted) | 7.6 | 4.2 | 10.6 | 3.8 | 8.9 | | 9.5 |
| 1098 | | | | | | | | | | |
| 186, | CT-148 | 25544 | Glucose Phosp. Isomerase | — | — | 2.1 | — | — | | — |
| 1099 | | | | | | | | | | |
| | CT2-104 | 41096 | beta IG-H3 (secreted) | 2.4 | 2 | 2.5 | 2.1 | 3.5 | | 2.4 |
| 665, | CT2-167 | 39819 | Keratin 19 (shed) | 3.4 | — | 3.7 | 2.3 | 3.9 | | 5.2 |
| 1111, | | | | | | | | | | |
| 1115 | | | | | | | | | | |
| 630 | CSE-2 | 35997 | Unkn (hAG-3) (secreted) | 5.6 | 5.3 | 6 | — | 6.6 | | 5.7 |
| 571, | CS1-104 | 31409 | Squalene epoxidase | — | — | 2.4 | — | 3.1 | | — |
| 1103, | | | | | | | | | | |
| 1107 | | | | | | | | | | |
| 573, 574, | CS1-106 | 31364 | Mad p2 | 2.2 | — | 2.4 | — | 3.8 | | 2.2 |
| 1104, | | | | | | | | | | |
| 1108 | | | | | | | | | | |
| 578, | CS1-123 | 31396 | Epith-spec trans fac. ESE-1b | 3.9 | — | 4.4 | 2.4 | 6 | | 8.5 |
| 1105, | | | | | | | | | | |
| 1109 | | | | | | | | | | |
| 587, | CS-152 | 32214 | Hu. Regenerating gene type | | | | | | | |
| 1069, | | | IV | | | | | | | |
| 1070 | | | | | | | | | | |
| 591, | CS1-160 | 32222 | KSA; adenocarc-assoc Ag | — | — | 2 | — | 3.4 | | 2.7 |
| 1106, | | | | | | | | | | |
| 1110 | | | | | | | | | | |

| | | | | | |
|---|---|---|---|---|---|
| 675, | CT2-222 | 39848 | Mu. valosin containing pro.; | 1.24 | **Very low overexpression on 13/38 tumors, |
| 1113, | | | Hu. homolog | | and on 5/37 normals |
| 1117 | | | | | |
| 1101, | CT2-136; | 41099 | Hu. heat shock protein apg-2 | 1.08 | **Low to high overexpression on all tumors; Moderate |
| 1102 | (identi- | (24115) | | | OE in N. thymus, low OE in N.lung, pano., b.marrow, |
| (161) | cal to CT- | | | | skel.muscle, skin, aorta, heart, act.PBMC, fetal |
| | 17) | | | | |
| 1112, | CT2-147 | 41100 | Hu. Fc fragment of IgG | 1.87 | **Moderate OE in 4, low OE in 8 tumors; low |
| 1116, | | | binding protein (FCGBP) | | OE in 2, mod. OE in N.b.marrow, co |
| 172 | PACSINA-6 | (24595) | Hu. PACSIN2 | 1.57 | **Low-moderate OE in 34/37 tumors; Moderate OE in |
| | | | | | N.colon, lung, b.marrow, aorta, skin act.PBMC |

*Met ratio of means
**Clones were picked based upon their low overexpression in normals, not necessarily due to their levels of overexpression positives.

[1329] TABLE 2
Microarray and Genbank search analysis of cDNAs isolated from a serological expression library:
Sequences that showed no significant similarity to known sequences in Genbank

| | | | | Ratio of Median Values | | | | | | |
|---|---|---|---|---|---|---|---|---|---|---|
| | | | | Tumor/Normal Tissue | | | | | | |
| SEQ | Clone | Sequence | | | | | | | | |
| ID NO: | Name | Identifier | GenBank ID | T/N | DA/N | DB/N | DC/N | DD/N | Met* | T/N-C |
| 193, 623, | CT-594 | 27540 | Mus musculus 10 day old male pancreas | | | | | | 40 | |
| 1082, | | | cDNA (Mouse EST hits: 113 embryonic, fetal | | | | | | | |
| 1083 | | | newborn, etc) | | | | | | | |

| | | | | |
|---|---|---|---|---|
| 1100 | CT2-283 | 41103 | 1.59 | **Low OE in 35/37 tumors; low OE in N.colon, |
| | | | | b.marrow, skin, aorta |

*Met ratio of means
**Clones were picked based upon their low overexpression in normals, not necessarily due to their levels of overexpression positives.

### Example 9

### Northern and Real Time PCR Expression Analysis of the C799P Colon Tumor Antigen

[1330] Searches of the C799P sequence (which relates to Clone Identifier No 14308 and the cDNA sequences disclosed in SEQ ID NOs: 40, 132, 684, and 690; and the amino acid sequences disclosed in SEQ ID NOs: 686 and 692) were performed against Genbank, human EST and Geneseq databases. A match was found against the 6410 bp NADPH thyroid oxidase 2 (THOX2) mRNA (SEQ ID NO: 1094). An ORF of 1548 amino acids was identified (SEQ ID NO: 1095). PSORTII protein motif prediction analysis suggests the protein contains a cleavable signal peptide and 9 transmembrane domains.

[1331] mRNA expression levels were further analyzed using real-time PCR. Real-time PCR (see Gibson et al., Genome Research 6:995-1001, 1996; Heid et al., Genome Research 6:986-994, 1996) is a technique that evaluates the level of PCR product accumulation during amplification. This technique permits quantitative evaluation of mRNA levels in multiple samples. Briefly, niRNA was extracted from tumor and normal tissue and cDNA was prepared using standard techniques. Real-time PCR was performed using a Perkin Elmer/Applied Biosystems (Foster City, Calif.) 7700 Prism instrument. Matching primers and fluorescent probes were designed for C799P using the primer express program provided by Perkin Elmer/Applied Biosystems (Foster City, Calif.). Optimal concentrations of specific and control (e.g., β-actin) primers and probes were determined. To quantitate the amount of specific RNA in the samples (see Table 3), a standard curve was generated using a plasmid containing C799P. Standard curves were generated using the Ct values determined in the real-time PCR, which are related to the initial cDNA concentration used in the assay. Standard dilutions ranging from 10-10⁶ copies of the gene of interest are generally sufficient. In addition, a standard curve was generated for the control sequence. This permitted standardization of initial RNA content of the tissue samples to the amount of control for comparison purposes. The real-time data showed that C799P is overexpressed in 12 of 31 colon tumor samples when compared to expression seen in normal tissues. Some expression of C799P was observed in normal prostate, lung, pancreas, stomach, salivary gland, thyroid, and esophagus, although expression levels were markedly lower than those seen in colon tumor samples. Overexpression was also observed in lung and ovarian tumor samples. These data indicate that C799P has applicability in diagnostic and/or immunotherapeutic uses.

[1332] Northern analysis confirmed the real-time and earlier microarray data which showed C799P to be overexpressed in colon tumor.

### Example 10

### Full-Length Cloning of C884P Coding Sequence and Expression of C884P-HIS AND MAPS-C884P-HIS in HEK293T Cells

[1333] The full-length C884P protein coding sequence was cloned by RT-PCR. Standard RT-PCR was performed to clone the C884P ORF (including the signal sequence) into the TA cloning vector. The mRNA was isolated from a colon tumor, reverse transcribed to cDNA and used as template for PCR. The primers used for the RT-PCR have the following sequence:

[1334] C884P-HisTag-AW175: (sense primer) Id=10468 (SEQ ID NO: 1123)

[1335] 5′ ggagctagcgccgccATGGCAGGTGTGAGTGCCTG

[1336] C884P-HisTag-AW176: (antisense primer) Id=10469 (SEQ ID NO: 1124)

[1337] 5′ gccggatccTCAatggtgatggtgatggtgTTTGTTCCCGATCTGGCAATACAG

[1338] Six His residues were built into the 3′ primer (C884P-HisTag-AW176) immediately upstream of the stop codon. The cloned C884P gene was confirmed by DNA sequencing.

[1339] Full-length C884 with a C-terminal His tag was cloned into JA4304 at Nhe I and BamH I sites using standard molecular biology techniques (cDNA and amino acid sequences set forth in SEQ ID NOs: 1120 and 1122, respectively). Similarly, a fusion construct of MAPS-C884P-CHisTag was also made (cDNA and amino acid sequences set forth in SEQ ID NOs: 1119 and 1121, respectively). Both constructs were confirmed by DNA sequencing.

[1340] Different amounts (0.1 μg, 0.33 μg, 1 μg and 2 μg) of purified plasmids HEK293 cells. Cells were harvested 48 h later, and both the supernatant and cell lysate fractions were examined for the expression of C884P-CHisTag or MAPS-C884P-CHisTag proteins by western blots using anti-MAPS antibody and anti-C-terminal His tag antibody. No protein expression was observed by western blots in the supernatant fraction for all three transfections using either anti-MAPS antibody or anti C-terminal Histag antibody. With the anti-MAPS antibody, clean western bands were observed in a concentration dependent manner in the cell lysate transfected with MAPS-C884 fusion construct.

### Example 11

### Synthesis of Polypeptides

[1341] Polypeptides may be synthesized on a Perkin Elmer/Applied Biosystems Division 430A peptide synthesizer using FMOC chemistry with HPTU (O-Benzotriazole-N,N,N′, N′-tetramethyluronium hexafluorophosphate) activation. A Gly-Cys-Gly sequence may be attached to the amino terminus of the peptide to provide a method of conjugation, binding to an immobilized surface, or labeling of the peptide. Cleavage of the peptides from the solid support may be carried out using the following cleavage mixture: trifluoroacetic acid:ethanedithiol:thioanisole:water:phenol (40:1:2:2:3). After cleaving for 2 hours, the peptides may be precipitated in cold methyl-t-butyl-ether. The peptide pellets may then be dissolved in water containing 0.1% trifluoroacetic acid (TFA) and lyophilized prior to purification by C18 reverse phase HPLC. A gradient of 0%-60% acetonitrile (containing 0.1% TFA) in water (containing 0.1% TFA) may be used to elute the peptides. Following lyophilization of the pure fractions, the peptides may be characterized using electrospray or other types of mass spectrometry and by amino acid analysis.

[1342] From the foregoing it will be appreciated that, although specific embodiments of the invention have been described herein for purposes of illustration, various modifications may be made without deviating from the spirit and scope of the invention. Accordingly, the invention is not limited except as by the appended claims.

What is claimed:

1. An isolated polynucleotide comprising a sequence selected from the group consisting of:
(a) sequences provided in SEQ ID NOs: 1-121, 123-197, 205-630, 632-684, 686, 690-691, 694-1058, 1069, 1071-1076, 1082, 1084, 1086, 1092, 1094, 1096-1101, 103-1106, 1111-1114, 1119, and 1120;
(b) complements of the sequences provided in SEQ ID NOs: 1-121, 123-197, 205-630, 632-684, 686, 690-691, 694-1058, 1069, 1071-1076, 1082, 1084, 1086, 1092, 1094, 1096-1101, 1103-1106, 1111-1114, 1119, and 1120;
(c) sequences consisting of at least 20 contiguous residues of a sequence provided in SEQ ID NOs: 1-121, 123-197, 205-630, 632-684, 686, 690-691, 694-1058, 1069, 1071-1076, 1082, 1084, 1086, 1092, 1094, 1096-1101, 1103-1106, 1111-1114, 1119, and 1120;
(d) sequences that hybridize to a sequence provided in SEQ ID NOs: 1-121, 123-197, 205-630, 632-684, 686, 690-691, 694-1058, 1069, 1071-1076, 1082, 1084, 1086, 1092, 1094, 1096-1101, 1103-1106, 1111-1114, 1119, and 1120, under moderately stringent conditions;
(e) sequences having at least 75% identity to a sequence of SEQ ID NOs: 1-121, 123-197, 205-630, 632-684, 686, 690-691, 694-1058, 1069, 1071-1076, 1082, 1084, 1086, 1092, 1094, 1096-1101, 1103-1106, 1111-1114, 1119, and 1120;
(f) sequences having at least 90% identity to a sequence of SEQ ID NOs: 1-121, 123-197, 205-630, 632-684, 686, 690-691, 694-1058, 1069, 1071-1076, 1082, 1084, 1086, 1092, 1094, 1096-1101, 1103-1106, 1111-1114, 1119, and 1120; and
(g) degenerate variants of a sequence provided in SEQ ID NOs: 1-121, 123-197, 205-630, 632-684, 686, 690-691, 694-1058, 1069, 1071-1076, 1082, 1084, 1086, 1092, 1094, 1096-1101, 1103-1106, 1111-1114, 1119, and 1120.

2. An isolated polypeptide comprising an amino acid sequence selected from the group consisting of:
(a) sequences encoded by a polynucleotide of claim 1;
(b) sequences having at least 70% identity to a sequence encoded by a polynucleotide of claim 1;
(c) sequences having at least 90% identity to a sequence encoded by a polynucleotide of claim 1;
(d) sequences set forth in SEQ ID NOs: 122, 198-204, 631, 685, 687, 692, 693, 1059-1068, 1070, 1077-1081, 1083, 1085, 1087, 1093, 1095, 1102, 1107-1110, 1115-1118, 1121, and 1122;
(e) sequences having at least 70% identity to a sequence set forth in SEQ ID NOs: 122, 198-204, 631, 685, 687, 692, 693, 1059-1068, 1070, 1077-1081, 1083, 1085, 1087, 1093, 1095, 1102, 1107-1110, 1115-1118, 1121, and 1122; and
(f) sequences having at least 90% identity to a sequence set forth in SEQ ID NOs: 122, 198-204, 631, 685, 687, 692, 693, 1059-1068, 1070, 1077-1081, 1083, 1085, 1087, 1093, 1095, 1102, 1107-1110, 1115-1118, 1121, and 1122.

3. An expression vector comprising a polynucleotide of claim 1 operably linked to an expression control sequence.

4. A host cell transformed or transfected with an expression vector according to claim 3.

5. An isolated antibody, or antigen-binding fragment thereof, that specifically binds to a polypeptide of claim 2.

6. A method for detecting the presence of a cancer in a patient, comprising the steps of:
(a) obtaining a biological sample from the patient;
(b) contacting the biological sample with a binding agent that binds to a polypeptide of claim 2;
(c) detecting in the sample an amount of polypeptide that binds to the binding agent; and
(d) comparing the amount of polypeptide to a predetermined cut-off value and therefrom determining the presence of a cancer in the patient.

7. A fission protein comprising at least one polypeptide according to claim 2.

8. An oligonucleotide that hybridizes to a sequence recited in SEQ ID NOs: 1-121, 123-197, 205-630, 632-684, 686, 690-691, 694-1058, 1069, 1071-1076, 1082, 1084, 1086, 1092, 1094, 1096-1101, 1103-1106, 1111-1114, 1119, and 1120, under moderately stringent conditions.

9. A method for stimulating and/or expanding T cells specific for a tumor protein, comprising contacting T cells with at least one component selected from the group consisting of:
(a) polypeptides according to claim 2;
(b) polynucleotides according to claim 1; and
(c) antigen-presenting cells that express a polynucleotide according to claim 1, under conditions and for a time sufficient to permit the stimulation and/or expansion of T cells.

10. An isolated T cell population, comprising T cells prepared according to the method of claim 9.

11. A composition comprising a first component selected from the group consisting of physiologically acceptable carriers and immunostimulants, and a second component selected from the group consisting of:
(a) polypeptides according to claim 2;
(b) polynucleotides according to claim 1;
(c) antibodies according to claim 5;
(d) fusion proteins according to claim 7;
(e) T cell populations according to claim 10; and
(f) antigen presenting cells that express a polypeptide according to claim 2.

12. A method for stimulating an immune response in a patient, comprising administering to the patient a composition of claim 11.

13. A method for the treatment of a cancer in a patient, comprising administering to the patient a composition of claim 11.

14. A method for determining the presence of a cancer in a patient, comprising the steps of:
(a) obtaining a biological sample from the patient;
(b) contacting the biological sample with an oligonucleotide according to claim 8;
(c) detecting in the sample an amount of a polynucleotide that hybridizes to the oligonucleotide; and
(d) compare the amount of polynucleotide that hybridizes to the oligonucleotide to a predetermined cut-off value, and therefrom determining the presence of the cancer in the patient.

15. A diagnostic kit comprising at least one oligonucleotide according to claim 8.

16. A diagnostic kit comprising at least one antibody according to claim 5 and a detection reagent, wherein the detection reagent comprises a reporter group.

17. A method for inhibiting the development of a cancer in a patient, comprising the steps of:
(a) incubating CD4+ and/or CD8+ T cells isolated from a patient with at least one component selected from the group consisting of: (i) polypeptides according to claim 2; (ii) polynucleotides according to claim 1; and (iii) antigen presenting cells that express a polypeptide of claim 2, such that T cell proliferate;
(b) administering to the patient an effective amount of the proliferated T cells, and thereby inhibiting the development of a cancer in the patient.

The application's sequence listing, which the Patent Office published only in electronic form, follows.

SEQUENCE LISTING (1124 sequences)

SEQ ID NO: 1 - DNA, 458 bp, Homo sapiens
  misc_feature 1: n = A,T,C or G
ncaggtctggcggcacctgtgcactcagccgtcgatacactggtcgattgggacagggaagacgatgtggttttcagggaggcccagagatttggagaagcggatgaagttctcctttagttccgaagtcagctccttggttctcccgtagagggtgatcttgaagtactccctgttttgagaaactttcttgaagaacaccatagcatgctggttgtagttggtgctcaccactcggacgaggtaactcgttaatccagggtaactcttaatgttgcccagcgtgaactcgccgggctggcaacctggaacaaaagtcctgatccagtagtcacacttctttttcctaaacaggacggaggtgacattgtagctcttgtcttctttcagctcatagatggtggcatacatcttttgcgggtctttgtcttctctgagaattgcattccctgccagga

SEQ ID NO: 2 - DNA, 423 bp, Homo sapiens
cagggtccataggtgatccgcaactctcgagcatttatatacaatagcaaatcatccagtgtgttgtacagtctataatactccaacagtctcccatctgtattcaatggcgccacccaatacagtcctttgtttggatgctggggagagtaatccctaccccaagcaccatatagataagaaaaccctctccagttgagctgaaccacagacggtttgctgatgttcaccacaccaccatgaccacagctccctggagtgggaggagggtggacgacaggggtgttttgatctttagaggcttcacactctttcagcttggtcttcagagccacgatttctcggcgaatggcaaggacattgtttttgtctagtgtctcaagcttctctaccaagagagtcatatttcttatctccacctcc

SEQ ID NO: 3 - DNA, 538 bp, Homo sapiens
ggtctgtccaatggcaacaggaccctcactctaytcartgtcacaagraatgayrcagsamsctayraatgtgaaayccagaacccagtgagtgccarscgcagtgayycagtcatcctgaatgtcctctatggcccrgatgmccccaccatttcccctctaaacacatmttaccgwycaggggaaaatctgaacctctcctgccacgcagcctctaacccacctgcacagtactcttggtttrtcaatgggactttccagcaatccacmcaagagctctttatccccaacatcactgtgaataatagyggatcctatacgtgccaagcccataactcagmcactggcctcaataggaccacagtcacgacgatcacagtctatgcaagagccacccaaacccttcatcaccagcaacaactccaaccccgtggaggatgaggatgctgtagccttaacctgtgaacctgagattcagaacacaacctacctgtggtgggtaaataatcagagcctcccggtcagtcccaggctgcag

SEQ ID NO: 4 - DNA, 309 bp, Homo sapiens
tggtaasccaaaaagatgctggggcagattgtggacaagtagaagaacctccttcccctctgcgaacattgaacggcgtggattcaatagtgagcttggcagtggtgggcgggttccagaaggttagaagtgaggctgtgagcaggagcccctgccaggggatvcacgcamtctgtggggaggggctgagrggdgwcyccatggtctctgctgtctgctctgtcctcctctgtggagaagagcttgagctccaggaacgctttgrtcavggctgcctgtgacctytgctctgbtctgcctgcccgggcg

SEQ ID NO: 5 - DNA, 412 bp, Homo sapiens
gtccaatggcaacaggacccctcacttctattcaatgtcacaagaaatgacgcaagagcctatgtatgtggaatccagaactkcagtgagtgcaaaccgcagtgacccagtcaccctggatgtcctctatgggccagacascccccatcatttcccccccagactcgtcttacctttcgggagcgaacctcaacctctcctgccactcggcctctaacccatccccgcagtattcttggckgtatcaatgggataccgcagcaacacacacaagttctctttatcgccaaaatcacgccaaataataacgggacctatgcctgttttgtctctaacttggctactggcccgcaataattccatagtcaagagcatcacagtcttctgcatctggaacttctcctggtcttct

SEQ ID NO: 6 - DNA, 332 bp, Homo sapiens
gtgcaagggctttacaaaaactgtgccagtkrcttctycatgwsrcwrgatctgacttkattsaygttktatgagsysyasaatmctgawgctcmttytssakgrwsttckgsatmrgcagtsrattcsacatttgggrtakrtymtctctsgaagysamtgtcakgcagtgrcayccwrgkktcwgcwtgcwgtgrgttamcakcmwtrywtagkgsgmayatratttaramrgtayakcymtctcmctcytycmccaywtgcwcaassmkcacacctcggccgcgaccacgctaagcccgaattccagcacactggcggccgttactagt

SEQ ID NO: 7 - DNA, 401 bp, Homo sapiens
tggtgttgttggcgccagttccctggacctggaacagccgtgtggagggcccggtctccaagttgttagttcgggaggtgcctccctggtagaccaccatgcgtcccttgaagatggacataagatgaggtggctccttgcccattgggacccggatctggactggttcaccattgtacttctggtccaggatgacggcttgataagctgatgctgtaatttcatcttggctggcctggctgccctgccaaacgtagagcaggtaatgctgcttctcgccgatgaaggtaggtgtaagagcagcaggtaagcaagttcgcccccatagaagtgggcctagccacttggaattccagcacactggcggcccgttactagtgggatcccgagctcggtaccaa

SEQ ID NO: 8 - DNA, 1151 bp, Homo sapiens
ctctctccataaaactcagcactttacagatgtagaatatataagcatgccaaatttacttatctgccacatacaaagcatcattccaggtgctagtgaggggaaaaaaaagttggagatttggtccctcgaggagctccagatattaatctacctaactaagtccccaggtttcttccaggcatggaagaattagtggtgctacatggatgaggactagtcattgggcaatatttcctgtacaaagaatccctagacgccatactgagttttaagttccttaattcctaatttaaggcttctagtgaagcctcctcacagtaggcttcactaggcccacagtgcccctagacctctgacaatcccaccctagacagactttattgcaaaatgcgcctgaagaggcagatgattcccaagagaactcaccaaatcaagacaaatgtcctagatctctagtgtggtagaactatgcacctaaacattgctgcaaaatgaacacacttttagacacccctgcagatatctaagtaagtggagaagactattttttcaacaaacattttctctttcaccctaactcctaaacagcttactggggcttctgcaagacagaaagatcataattcagaaggtaaccatcgttatagacataaagtttctggtcaaaagggttatagttaatgctctgcactttttcctgcatcttatgcattacaatgtctagtttgccctctttccctgtgtttgtgtcataatagtaaaaaatctcttctgttctggtgtttcatagtacgggtggcatacagaaccccacataccatgaaggcgttagaagcagatggtttatactgcttggtataccaagtgtttagcacctgaagtgtggtgtcattgagtttactaatcaccatgttaccagtgctggcttcagttgaataaataacccacaatccattctcatccacagcaaagtcaatatcttgccaagcaacattagcatatgaaaagcggttattataggcagcattagggagagtttgagtcacagcaatcgtgttggtggtcaggttaactctggcaatattcccggtgttgtacatgttgacgtacatgttgttgttgtaaactgctgtaccactaccttggac

SEQ ID NO: 9 - DNA, 604 bp, Homo sapiens
  misc_feature 410, 427: n = A,T,C or G
ctgtgcaagggctttacaaaaactgtgccaggacttcccatgaggctggattgcttgattcatgttttatgagccccacaatactgaagctccttttccagggacttggcataggcagtcaattccacatttgggataggtcctctctggaagtgaatgtcaggcagtgacatccaagtttctgcatgcagtgggttaacagccatgtttagggggaacatgatttaaaaagtacatctctctccctcctcccccacatgcacaaggctcacatctcattatggtgkcggcccatgtcacattaaagtgtgatacttkggttttgaaaacattcaaacagtctctgtggaaatctggagagaaattggcggagagctgccgtggtgcattcctcctgtagtgcttcaagntaatgcttcatcctttnttaataacttttgatagacaggggctagtcgcacagacctctgggaagccctggaaaacgctgatgcttgtttgaagatctcaagcgcagagtctgcaagttcatcccctctttcctgaggtctgttggctggaggctgcagaacattggtgatgacatggaccacgccatttgtgg

SEQ ID NO: 10 - DNA, 473 bp, Homo sapiens
tcgagaagatccctagtgagactttgaaccgtatcctgggcgacccagaagccctgagagacctgctgaacaaccacatcttgaagtcagctatgtgtgctgaagccatcgttgcggggctgtctgtggagaccctggagggcacgacactggaggtgggctgcagcggggacatgctcactatcaacgggaaggcgatcatctccaataaagacatcctagccaccaacggggtgatccactacattgatgagctactcatcccagactcagccaagacactatttgaattggctgcagagtctgatgtgtccacagccattgaccttttcagacaagccggcctcggcaatcatctctctggaagtgagcggttgaccctcctgggctcccctgaattctgtattcaaagatggaacccctccaattgatgcccatacaaggaatttgcttcggaaccacataattaaaga

SEQ ID NO: 11 - DNA, 411 bp, Homo sapiens
  misc_feature 251, 276, 406, 409: n = A,T,C or G
tcctcattggtcggggccaaaagcgtgtactggccgttaccttcaagcatcgtgttgagccctgatgcagccacagcagcccgaagggtctcaaaggtgtcctcgatctcaatgatctgctggatgttgttggtgatggtggagatgaccttatcgatgaggtgcaccaccccgttggttgcatggtggtcggctttyarcarccgggcacagttcacagttacaatcccattaggatagtggtggatctnggatgttggaattctggtacatagnaggtgaggggtcatgcccgtgtttcagctcatcagtcaggactcgcctgcccaccatatggtaagcsgragggcatttgagcagctcaatgtttgacattgctggaccaggggagttccagcacttctanganga

SEQ ID NO: 12 - DNA, 560 bp, Homo sapiens
tacttgcctggagatwgcyttykckwtmtgytcwrawgtccgtggatacagaaatctctgcaggcaagttgctccagagcatattgcaggacaagcctgtaacgaatagttaaattcacggcatctggattcctaatccttttccgaaatggcaggtgtgagtgcctgtataaaatattctatgtttaccttcaacttcttgttctggctatgtggtatcttgatcctagcattagcaatatgggtacgagtaagcaatgactctcaagcaatttttggttctgaagatgtaggctctagctcctacgttgctgtggacatattgattgctgtaggtgccatcatcatgattctgggcttcctgggatgctgcggtgctataaaagaaagtcgctgcatgcttctgttgtttttcataggcttgcttctgatcctgctcctgcaggtgggcgacaggtatcctaggagctgttttcaaatctaagtctgatcgcattgtgaatgaaactctctatgaaaacacaaagcttttgagcgccacaggggaaagtgaaaaacaa

SEQ ID NO: 13 - DNA, 150 bp, Homo sapiens
gggcaggctgtctttttaaaatgtctcggctagctagaccacagatatcttctagacatattgaacacatttaagatttgagggatataagggaaaatgatatgaatgtgtatttttactcaaaataaaagtaactgtttacgttggtga

SEQ ID NO: 14 - DNA, 403 bp, Homo sapiens
ctgctgcctgtggcgtgtgtgggctggatcccttgaaggctgagtttttgagggcagaaagctagctatgggtagccaggtgttacaaaggtgctgctccttctccaacccctacttggtttccctcaccccaagcctcatgttcataccagccagtgggttcagcagaacgcatgacaccttatcacctccctccttgggtgagctctgaacaccagctttggcccctccacagtaaggctgctacatcaggggcaaccctggctctatcattttccttttttgccaaaaggaccagtagcataggtgagccctgagcactaaaaggaggggtccctgaagctttcccactatagtgtggagttctgtccctgaggtgggtacagcagccttggttcctctg

SEQ ID NO: 15 - DNA, 688 bp, Homo sapiens
  misc_feature 638, 639, 649, 660, 666, 669, 671, 673, 674, 679, 684: n = A,T,C or G
caaagcacattttaatcatttattttaaaagggggagtaaagcatttaaactgccaatcctatagactaggacttgaacatcaaaggaaaaatagacaaagactagatgataaagtcattcaaaagcacagaagcacatcacatacaccagcaaggtttccaactactgcactgattaactagatactctcaatagcttttctatagctcgtcctagaaaaaaaaattaaattttcattttcttacaagttccaggcttaaacaaaggcaaaaattacatgcaacaactgatacactcataagttgcacatatgctccaaggtctttattagataacaataaatgctagcactttgtcactgccatcagattttccttatagtcttagagtcatgtaaataaaagttccataatgaaattaaagaaaattaatttttctaatcttagatcagttccatagaaaactattaatttttttaaagtaggcagtagaagggggttggtggggggtggaattggttagtaagtctggttctaatcttctgagctgcctttggaaggaagttatgaggtagaagattctactgacttttagtaaggtggacaatgagagaaaagaaaaagcaggtgcctcatcnncagatccttntggtatttatntgccangtncnanntaatncatanaaag

SEQ ID NO: 16 - DNA, 408 bp, Homo sapiens
caggtcatcaagatgacttacaggatgtaatagggagagctgtcgagattggtgttaaaaagtttatgattacaggtggaaatctacaagacagtaaagatgcactgcatttggcacaaacaaatggtatgtttttcagtacagttggatgtcgtcctacaagatgtggtgaatttgaaaagaataaccctgatctttacttaaaggagttgctaaatcttgctgaaaacaataaagggaaagttgtggcaataggagaatgcggacttgattttgacccgactgcagttttgtcccaaagatactcaactcaaatattttgaaaaacagtttgaactgtcagaacaaacaaaattaccaatgtttcttcattgtccgaaactcacatgctgaatttttggacataat

SEQ ID NO: 17 - DNA, 407 bp, Homo sapiens
ggtcctggggaggccctaggggagcaccgtgatggagaggacagagcaggggctccagcaccttctttctggactggcgttcacctccctgctcagtgcttgggctccacgggcaggggtcagagcactccctaatttatgtgctatataaatatgtcagatgtacatagagatctattttttctaaaacattcccctycccactcctctcccacagagtgctggactgttccaggccctccagtgggctgatgctgggacccttaggatggggctcccagctcctttctcctgtgaatggaggcagaagacctccaataaagtgccttctgggctttttctaacctttgtcttagctacctgtgtactgaaatttgggcctttggatcgaatatggtcaagaggtt

SEQ ID NO: 18 - DNA, 405 bp, Homo sapiens
tgaagagtcaacttgggcctggaggactgataaagtttgtgattttgagggcctctaaaagtattaaagcagcggcagccgctgcacgcagacatgagggctaggttaaaacagtaagatcaagttgtttggacagaaaggctacagagtgtggtcctggctcttgtgtaagaattacgaccacgctaaccatgcctaggaaggaaaggagttattgttttgtagaaaggtgctggggtttgagagatcagtcggacacgattggcagggagagcacgtgtgtttttatgagaattatgcccgagataggtaacagatgaggaagaaatttgggcttgattgaagtaatgggggctgtctgtgaagctttgcagcagtacagcctaggtaatttgctgagcctaa

SEQ ID NO: 19 - DNA, 401 bp, Homo sapiens
tcctgacattcctgccttcttatattaataagacaaataaaacaaaatagtgttgaagtgttggggcagcgaaaatttttggggggtggtatggagagataatgggcgatgtttctcagggctgcttcaagcgggattaggggcggcgtgggagcctagagtgggagagattaagctgaagggaggtcttgtggtaaggggtgatatcatggggatgttagaagaaacatttgtcgtatagaatgattggtgatggcctggatacggttttggatgatttgagaagctaaatggaagatacaaggtccgaataaaaggaggagaaaaatgggtattaaatgtctaagaattgggaggacctaggacatctgattagagagtgcctaaggagattcagcata

SEQ ID NO: 20 - DNA, 331 bp, Homo sapiens
aggtccagctctgtctcatacttgactctaaagtcatcagcagcaagacgggcattgtcaatctgcagaacgatgcgggcattgtccacagtatttgcgaagatctgagccctcaggtcctcgatgatcttgaagtaatggctccagtctctgacctggggtcccttcttctccaagtgctcccggattttgctctccagcctccggttctcggtctccaggctcctcactctgtccaggtaagaggccaggcggtcgttcaggctttgcatggtctccttctcgttctggatgcctcccattcctgccagacccccggctatcccggtgg

SEQ ID NO: 21 - DNA, 346 bp, Homo sapiens
  misc_feature 257: n = A,T,C or G
ggtccaccacttgtacccgatatggacttccggcttctctgtccaatggagccacactaaagatctcaccagtcacgtggtcaattttaagccaacctcttgtgtctcccctcagtgaatagcttatgtccagaccttctggatccttggcagtcacattgcccactttagtgcctatagctacatcctcactgactttcgcttggaatacgtgttgggaaaattgaggtgcttcattcacatctgtcacaataagncgtgaacttggcaaaagaacttgcattgtacttcacaccaaacactagaggctcaggattttctgctttgaacacaatgttggaaacag

SEQ ID NO: 22 - DNA, 360 bp, Homo sapiens
  misc_feature 317: n = A,T,C or G
gaagactccctctctcggaagccggatcccgagccgggcaggatggatcaccaccagccggggactgggcgctaccaggtgcttcttaatgaagaggataactcagaatcatcggctatagagcagccacctacttcaaacccagcacccgcagattgtgcaggctgcgtcttcagcaccagcacttgaaactgactcttcccctccaccatatagtagtattactggtggaagtacctacaacttcagatacagaagtttacggtgagttttatcccgtgccacctccctatagcgttgctacctctcttcctacnwtacgatgaaagctgagaaggctaaagctgctgcaatggcatg

SEQ ID NO: 23 - DNA, 251 bp, Homo sapiens
ggcggagctccacgacgagctggaaaaggaaccttttgaggatggctttgcaaatggggaagaaagtactccaaccagagatgctgtggtcacgtatactgcagaaagtaaaggagtcgtgaagtttggctggatcaagggtgtattagtacgttgtatgttaaacatttggggtgtgatgcttttcattagattgtcatggattgtgggtcaagctggaataggtctatcagtccttgtaataatgatgg

SEQ ID NO: 24 - DNA, 421 bp, Homo sapiens
  misc_feature 182: n = A,T,C or G
caggtctttcccaggtgttgactccagctccagcttcagctccagctccaggtcgggctccagctccagccgcagcttargcagcgggaggttctgtgtcccagttgttttccaatttcaccggctcccgtggatgamcgygggacctgycaswgctcctgtktycctgcyagsacaccacnytttyccgtggacacrarkggaacckcttggaattcacagctyatgttctttctcaraagtttgagaaagaactttctaaagtgagggaatatgtccaattaattagtgtgtatgaaaagaaactgttaaacctaactgtccgaattgacatcatggaraaaggataccatttcttacactgaactggacttcgagctgatcaaggtagaagtgaaggagatggaaaaactggtcatac

SEQ ID NO: 25 - DNA, 381 bp, Homo sapiens
  misc_feature 81, 146, 291, 355: n = A,T,C or G
gaactttttgtttctttattttcaatatttgtcttattaatatttttcttattttataatgcaattacaacaatttagganacaaaacaatataaacaaaagaatgttaaatagttttttttaaaaaatagcttgttgcttgcaanaaagtccatataatcttattcccccccaaatataattttatactttgcactaaaccaaaatagcttatggaaaattagtattaaatagctaaacacagaaaacctacagctataaataacataaaatacagtttaactttaatgngatgcttaaacaaagcaaactatgatgcaatatgaatcaacttcattaattggacaagtccagnggaggcacaaattagataagcactaa

SEQ ID NO: 26 - DNA, 401 bp, Homo sapiens
  misc_feature 219, 236, 276, 300, 303, 310, 325, 330, 335, 359, 374, 380,390: n = A,T,C or G
ggaaaagggactggcctctctgaagagtgagatgagggaagtggaaggagagctggaaaggaaggagctggagtttgacacgaatatggatgcagtacagatggtgattacagaagcccagaaggttgataccagaagccaagaacgctggggttacaatccaagacacactcaacacattagacgggctcctgcattctgatggaccaaccttttcangtggtaagattgaaganggggcctgggcttacctgggaagcaaaaacttttcccganccaaggaacccaggattcaaccangcnacttgcnggccaaggaaggcanaactnggaanaaaaggccccttaagcaaaagggncaccttcatttgctnggaaancagcctttanttggaatcttg

SEQ ID NO: 27 - DNA, 383 bp, Homo sapiens
  misc_feature 32, 38, 49, 100, 142, 147, 181, 250, 258, 272, 274, 297,340, 341, 366, 368, 377: n = A,T,C or G
aattgcaactggacttttattgggcagttacnacaacnaatgttttcanaaaaatatttggaaaaaatataccacttcatagctaagtcttacagagaanaggatttgctaataaaacttaagttttgaaaattaagatgcnggtanagcttctgaactaatgcccacagctccaaggaanacatgtcctatttagttattcaaataccagttgagggcattgtgattaagcaaacaatatatttgttanaactttgnttttaaattactgntncttgacattacttataaaggagnctctaactttcgatttctaaaactatgtaatacaaaagtatanntttccccattttgataaaagggccnangatactgantaggaa

SEQ ID NO: 28 - DNA, 401 bp, Homo sapiens
  misc_feature 212: n = A,T,C or G
ggtcgcgtttcccctggctcacagtctgccattatttgcatttttaaatgaagaaaagtttaacgtggatggatggacagtttacaatccagtggaagaatacaggaggcagggcttgcccaatcaccattggagaataacttttattaataagtgctatgagctctgcgacacttaccctgctcttttggtggttccgtatcgtgcctcanatgatgacctccggagagttgcaacttttaggtcccgaaatcgaattccagtgctgtcatggattcatccagaaaataagacggtcattgtgcgttgcagtcagcctcttgtcggtatgagtgggaaacgaaataaagatgatgagaaatatctcgatgttatcagggagactaataaacaaatttcta

SEQ ID NO: 29 - DNA, 401 bp, Homo sapiens
atatgagtttgccatctccatggatgccatttcaatgccttcagggtaatcattctctccccaaagactgcccacggggtcatcactcctgtgacgaaatgagggctggattgaagatgttctgctgagcacccccctggtcatctttggggtctcagaagagccataatcatgaccattctcagcatctgaataatcaggttctctccaagtgcttggcaagttctgattgtcctcagcactgggatagtctggctccccaaaaaagggtggagagttaggttgaatgtcagcgcctggataatcaggctttcccagagagtctgcgtatggattgattctaaaacttgtatgttccagattctttctggatcctggatggttcaaattggctctgggtc

SEQ ID NO: 30 - DNA, 401 bp, Homo sapiens
cctgaactatttattaaaaacatgaccactcttggctattgaagatgctgcctgtatttgagagactgccatacataatatatgacttcctagggatctgaaatccataaactaagagaaactgtgtatagcttacctgaacaggaatccttactgatatttatagaacagttgatttcccccatccccagtttatggatatgctgctttaaacttggaagggggagacaggaagttttaattgttctgactaaacttaggagttgagctaggagtgcgttcatggtttcttcactaacagaggaattatgctttgcactacgtccctccaagtgaagacagactgttttagacagactttttaaaatggtgccctaccattgacacatgcagaaattggt

SEQ ID NO: 31 - DNA, 297 bp, Homo sapiens
acctccattaatgccaggtgttcctcctctgatgccaggaatgccaccagttatgccaggcatgccacctggattgcatcatcagagaaaatacacccagtcattttgcggtgaaaacataatgatgccaatgggtggaatgatgccacctggaccaggaataccacctctgatgcctggaatgccaccaggtatgcccccacctgttccacgtcctggaattcctccaatgactcaagcacaggctgtttcagcgccaggtattcttaatagaccacctgcaccaacagcaactgt

SEQ ID NO: 32 - DNA, 401 bp, Homo sapiens
caaacctggagccaaaaaggacacaaaggactctcgacccaaactgccccagaccctctccagaggttggggtgaccaactcatctggactcagacatatgaagaagctctatataaatccaagacaagcaacaaacccttgatgattattcatcacttgggtgagtgcccacacagtcaagctttaaagaaagtgtttgctgaaaataaagaaatccagaaattggcagagcagtttgtcctcctcaatctggtttatgaaacaactgacaaacacctttctcctgatggccagtatgtccccaggattatgtttgttgacccatctctgacagttagagcccgatatcactggaagatattcaaaccgtctctatgcttacgaacctgcagatacagct

SEQ ID NO: 33 - DNA, 401 bp, Homo sapiens
agcagagggacaggaatcattcggccactgttcagacgggagccacacccttctccaatccaagcctggccccagaagatcacaaagagccaaagaaactggcaggtgtccacgcgctccaggccagtgagttggttgtcacttactttttctgtggggaagaaattccataccggaggatgctgaaggctcagagcttgaccctgggccactttaaagagcagctcagcaaaaagggaaattataggtattacttcaaaaaagcaagcgatgagtttgcctgtggagcggtgtttgaggagatctgggaggatgagacggtgctcccgatgtatgaaggccggattctgggcaaagtggagcggatcgattgagccctggggtctggctttggtgaactg

SEQ ID NO: 34 - DNA, 401 bp, Homo sapiens
aacaatggctatgaaggcattgtcgttgcaatcgaccccaatgtgccagaagatgaaacactcattcaacaaataaaggacatggtgacccaggcatctctgtatctgtttgaagctacaggaaagcgattttatttcaaaaatgttgccattttgattcctgaaacatggaagacaaaggctgactatgtgagaccaaaacttgagacctacaaaaatgctgatgttctggttgcttgagtctactcctccaggtaatgatgaaccctacactgagcagatggggcaactgtggagagaaggggtgaaaggatcccacctcactcctgatttcattgcaggaaaaaagttagcttgaatatggaccacaaggtaagggcatttgtccatgaatggggctc

SEQ ID NO: 35 - DNA, 401 bp, Homo sapiens
  misc_feature 184, 208, 251, 263, 284, 293, 296, 337, 395: n = A,T,C or G
catttcttcctactagactgcccccttgatccactggcagaaatgatggcaccaccttgtcttcaggtggtgctccttcattattccaaggatgcagcatctctatggtgccaggtatgggggtaaagcctttggcgccctttccgcaatggcacatcagcagtaaaagtggtaccaatagcangaacagaaagggcaaaatcatgancgcaattgctgcgggtcccaagcccacataggaatcatgctgngcttccctgcanccgctgccatgcaagacactnacaaactgngantgtaaggacctgcttttcaggacaactaaaaccctgattgnctgaaatcaggaactgaatttcacttctcccaagctttttctcactttggtgcaacancacact

SEQ ID NO: 36 - DNA, 401 bp, Homo sapiens
cctgctagaatcactgccgctgtgctttcgtggaaatgacagttccttgttttttttgtttctgtttttgttttacattagtcattggaccacagccattcaggaactaccccctgccccacaaagaaatgaacagttgtagggagacccagcagcacctttcctccacacaccttcattttgaagttcgggtttttgtgttaagttaatctgtacattctgtttgccattgttacttgtactatacatctgtatatagtgtacggcaaaagagtattaatccactatctctagtgcttgactttaaatcagtacagtacctgtacctgcacggtcacccgctccgtgtgtcgccctatattgagggctcaagctttcccttgttttttgaaaggggttta

SEQ ID NO: 37 - DNA, 401 bp, Homo sapiens
  misc_feature 2, 3, 6, 9, 16, 18, 19, 23, 30, 33, 48, 56, 59, 62, 73, 75,81, 85, 88, 89, 114, 116, 121, 137, 149, 158, 161, 168,183, 192, 232, 251, 308, 345, 348, 354, 363, 369, 391, 397,400, 401: n = A,T,C or G
cnnctntgnaatggantnnttgnctaaaanganttgatgatgatgaanatccctangangantaagcatggancntgatcntttnctnngcactcctttacgacacggaaacangnatcancatgatggtaccaganaccttatcaccnacgcgcacnganctgactnattccaaagagttgnggttacggncatccggtcattgctcgtgcccattgctgcagggctgatnctactggtgcttattatgntggccctgaggatgctccacaatgaatataagcatgctgcatgatcagcggcaacanatgctctgccgtttgcactacatctttcacggacacnatntcgaanacgggcacnttgcanagttagacttggaatgcatggngccggncann

SEQ ID NO: 38 - DNA, 401 bp, Homo sapiens
aattggctcactctctcaaggcaagcactgtctcaaggcagtctcaaggcagagatgacacagcaaaaaacagagggggagaaaaaagtctattattggcttgtgatttacaaaagccaaagtcctttagataaaaggccaggagtcgtaccaacatagataccaaatccaggagaacacagaccagcgataagagggacgcttccccatgacccagaccagcctaaagcccctgtgggggcagccagtggggagctgtcagaccttggacatggtggtctttgagaatgggtctgcccttctctccctgaccagttgggatagacacctgactggaatccttgacactggcaggtgtttctatgaacagagaggactgtgcctgtcttcctgaatcccaa

SEQ ID NO: 39 - DNA, 401 bp, Homo sapiens
  misc_feature 8, 209: n = A,T,C or G
tctggtanggagcaattctattatttggcattgcatggctgggttgaattaaaacagggagtgagaacaggtgagtctagaagtccaactctgaaaaggaccactgtacatttgaacacacggctgtgttaaagatgctgctaatgtcagtcactgggtgcactaaaggatctcttattttatgtaaaacgttgggaatgacaagatanaactgatactctggtaagttaccctctgaagctacttcttgtgaaatactaatgacagcatcatcctgccaagcgaaagaggcaggcataagcaaggacaaattaaaagggggtaagagccttatcatgatgaggagtcttgttttgacatcttgggaaaagctgtccatagtgtgaagtcgtcaatttctc

SEQ ID NO: 40 - DNA, 401 bp, Homo sapiens
tctggtcacccaactcttgtggaagaggggaattgagatcgagtactgaatatctggcagagaggctggaatccttcagccccagagcccagggaccactccagtagatgcagagaggggcctgcccaggggtcagggcagtgggtatcactggtgacatcaagaatatcagggctggggaggcatctttgtttcctggtgccctcctcaaagttgctgacactttggggacgggaaggggtagaagtagggctgctccttttggagctggagggaatagacctggagacagagttgaggcagtcgggctgtccaggttctaagcatcacagcttctgcactgggctctgaggagattctcagccagaggatcccagcctcctcctccctcaaatgtcaag

SEQ ID NO: 41 - DNA, 401 bp, Homo sapiens
  misc_feature 170, 317, 334, 364: n = A,T,C or G
ctggactaaaaatgtccactatggggtgcactctacagtttttgaaatgctaggaggcagaaggggcagagagtaaaaaacatgacctggtagaaggaagagaggcaaaggaaactaggtggggaggatcaattagagaggaggcacctgggatccaccttcttccttangtcccctcctccatcagcaaaggagcacttctctaatcatgccctcccgaagactggctgggagaaggtttaaaaacaaaaaatccaggagtaagagccttaggtcagtttgaaattggagacaaactgtctggcaaagggtgcganagggagcttgtgctcangagtccagcccgtccagcctcggggtgtangtttctgaagtgtgccattggggcctcaccttctctg

SEQ ID NO: 42 - DNA, 310 bp, Homo sapiens
ggttcgacaaatccccaaaaatggcaaattaagccctgtgacaaaataagttattggatcatacagaaatagcccaaatctggaaattttgaattaaaattgtaatcctgtaaaacaagttttggggtgaatggatttctttaataccaataatatttttaattcccaccacagatggatttgctgaatatgctaatgctgtgaatgagaaaacaattttggggtaggtatacccacaagtaatctgatgacaaaataaaccacagactgatgtcaaatggacaaaaaactgaaaatatgctgtgagaaa

SEQ ID NO: 43 - DNA, 401 bp, Homo sapiens
aggtcacttacacttgtgaccagtgtggggcagagacctaccagccgatccagtctcccactttcatgcctctgatcatgtgcccaagccaggagtgccaaaccaaccgctcaggagggcggctgtatctgcagacacggggctccagattcatcaaattccaggagatgaagatgcaagaacatagtgatcaggtgcctgtgggaaatatccctcgtagtatcacggtgctggtagaaggagagaacacaaggattgcccagcctggagaccacgtcagcgtcactggtattttcttgccaatcctgcgcactgggttccgacaggtggtacagggtttactctcagaaacctacctggaagcccatcggattgtgaagatgaacaagagtgaggatgat

SEQ ID NO: 44 - DNA, 401 bp, Homo sapiens
atccctgtaagtctattaaatgtaaataatacatactttacaacttctcttagtcggcccttggcagattaaatctttgcaaaattccatatgtgctattgaaaaatgaaataaaacctcagatgtctgaattcttatttcaaatacagttatataattattttaaattacaatatacaatttctgttaaatacaactgttaagggattctgagaacaattataagattataataatatatacaaactaacttctgaaatgacatgggttgtttccttcccaccctcctaccctctcaaagagtttttgcatttgctgttcctggttgcaaaaggcaaaagaaaatctaaaaatagtctgtgtgtgtccacgacatgctcgctcctttgagaatctcaaac

SEQ ID NO: 45 - DNA, 401 bp, Homo sapiens
  misc_feature 212, 224: n = A,T,C or G
gtgcctgctgcctggcagcctggccctgccgctgcctcaggaggcgggaggcatgagtgagctacagtgggaacaggctcaggactatctcaagagattttatctctatgactcagaaacaaaaaatgccaacagtttagaagccaaactcaaggagatgcaaaaaattctttggcctacctatactggaatggtaaactcccgcgtcatanaaataatgcaanaagcccagatgtggagtgccagatgttgcagaatactcactatttccaaatagcccaaaatggacttccaaagtggtcacctacaggatcgtatcatatactcgagacttaccgcatattacagtggatcgattagtgtcaaaggctttaaacatgtggggcaaagagatccccctg

SEQ ID NO: 46 - DNA, 401 bp, Homo sapiens
  misc_feature 70, 182: n = A,T,C or G
gtcagaattgtctttctgaaaggaagcactcggaatccttccgaactttccaagtccatccatgattcanagatactgccttctctctctctgggattttatgtgtttctgatagtgaattgttgatgtatttgctactttgcttcttttctctttcaagacttgatcattttatatgctgnttggagaaaaaaagaacttttggtagcaaggaggtttcaagaaatgattttggattttctgctgcggaatttctcggcacctacctgtagtatggggcacttggtttggttgcagagtaagaaggtggaagaatgagctgtacttggttaagcagttgaaaccttttttgagcaggatctgtaaaagcataattgaatttgtttcacccccgtggattc

SEQ ID NO: 47 - DNA, 401 bp, Homo sapiens
ggtctgcagcaatgcacttcaaccatacatactgcttccactagctaataccaaatgcaggttctcagatccagacaaatggaggaaaagaacatttatgcttccgtttcagaaagccaagtcgtagttttggcccttcctttctctaaagtttattcccaaaaacaggtagcattcctgattgggcagagaagaggatattttcagcccacatctgctgcaggtatgtcattttctcccatcttcactgtgactagtaaagatctcaccacttctctttggaatttccaactttgcttgtgattgaatgtcacttcgtgaatttgtattatgtcagatcacttggcattgctcttccatatgcatcaagttgccaggcactaaacccaatgttcatgaac

SEQ ID NO: 48 - DNA, 430 bp, Homo sapiens
acataacttgtaaactttttctgcttgggggctgtaacagacagaagagtaaagactacaaggattttctgaagatgcttcaatgaaaatcatcatttcctctttagtcatcccaagtcttggtttgaaaaacttgggcatggacttatacagaccttgaaccaccactgacttatcattgggtggcagaccttgaaaccaagctctctgtgttacttctgaaagtgcatcaattctgatttggctaagaacagaagacaaatactgggatcgtgattctgtgttatactctagccacagcatagcagcttctcgaacggtttcttccttttctacatttaaattgtcactactgagaatatctatcagtaggtcatgtgacagacctgccccggggccggcccgctcgatgcttgccgaatatcatggt

SEQ ID NO: 49 - DNA, 57 bp, Homo sapiens
  misc_feature 17, 44, 49: n = A,T,C or G
ggtattaacaatatcangcactcattcttcccctcttatgaaanggatnaattttta

SEQ ID NO: 50 - DNA, 327 bp, Homo sapiens
  misc_feature 6, 10, 20, 22, 25, 28, 30, 37, 40, 41, 42, 51, 58, 59, 68,69, 70, 75, 76, 79, 91, 95, 108, 109, 111, 142, 146, 180,200, 201, 213, 218, 233, 235, 247, 265, 290, 299, 306: n = A,T,C or G
gatggnggtntccacaagantnaangtncntattaantannncttgtaganccacttnnattaattgnnntatgnntgnccttctggtggntgtngaagcttcatatnntntttggacatcattacacgtcttagctctttnaagnacaactttaatgctatatgaattttgccattttngctaacactggtatgctccnngcatccaccatnccacntggaattatttattncnttcatattaatnttttgtttaccaaatctnacttgacccgaacgaaactttctgngtattttanggccccnccattcttacttttcaagcct

SEQ ID NO: 51 - DNA, 236 bp, Homo sapiens
cgtctcgaagaagcgctgcaggccgatgatggactgcacgtctgccttgtcctcagttaacttgttgaattgcttgaacatgcggcccacatcctgggcaaactcctgtggggagctgtagggaggtgacaacttctcctggaggcgggcacggatcagggtcagatccagggtgccaccgggctggtccagggagaaggtggagtcgtagccagacctgcccgggcggccgctcg

SEQ ID NO: 52 - DNA, 291 bp, Homo sapiens
  misc_feature 168, 197, 202, 209, 218, 257, 271, 287: n = A,T,C or G
ctcacatcctgggtccggctgtagagctgcaccatggtgctgagcgccccctccagctccttgtagatgtaaaggacggcgaaggagctgtagtctgtgtccacgatgcgcacgtccaggtagcccaaggccgggactctgaagttgtccctcggagcccaccttcangtactcgggcatccacctggttacagccnttcgncctcggnaactccatntggactttacaggccgccctcctctgtgggcctgatggnccttgcaggacatnggaacacgggagctcncttt

SEQ ID NO: 53 - DNA, 95 bp, Homo sapiens
  misc_feature 37, 60, 73, 76, 92: n = A,T,C or G
gtctgtgcagtttctgacacttgttgttgaacatggntaaatacaatgggtatcgctgancactaagttgtanaanttaacaaatgtgctgnttg

SEQ ID NO: 54 - DNA, 66 bp, Homo sapiens
  misc_feature 4, 8, 11, 13, 26, 27, 35, 38, 43, 47, 57: n = A,T,C or G
cctnaatnatntnaatggtatcaatnnccctgaangangggancggnggaagccggntttgtccgg

SEQ ID NO: 55 - DNA, 265 bp, Homo sapiens
  misc_feature 25, 223, 241, 254, 259: n = A,T,C or G
atctttcttctcagtgccttggccntgttgagtctatctggtaacactggagctgactccctgggaagagaggccaaatgttacaatgaacttaatggatgcaccaagatatatgaccctgtctgtgggactgatggaaatacttatcccaatgaatgccgtgttatgtttttgaaaatcggaaacgccagacttctatcctcattcaaaaatctgggccttnctgaaaaccagggttttnaaaatcccattcnggtcnccggcg

SEQ ID NO: 56 - DNA, 420 bp, Homo sapiens
  misc_feature 85, 164, 198, 228, 257, 261, 283, 298, 326, 385, 390: n = A,T,C or G
gagcggccgcccgggcaggtcctcgcggtgacctgatgggatttcaaaaccttggttctcagcaaggcccagatttttgaatgangatagaagtctggcgtttccgattttcaaaacataacacgcattcattgggataagtatttccatcagtcccacagacngggtcatatatcttgggtgcatccattaagttcntttgttaacatttgggcctctctttcccangggaattcagctcccagttgtttaccaanattnaactccaccggggccaaaggcncttgaaaaaaaaaanaattccttgtttaccttccttgggcttnaagttctggcgtccaaaagttcaatttgaaaactgcaccgcacttaccacgtctcttcnagaancctggggacacctcggccgcgaccacgcta

SEQ ID NO: 57 - DNA, 170 bp, Homo sapiens
gaagcggagttgcagcgcctggtggccgccgagcagcagaaggcgcagtttactgcacaggtgcatcacttcatggagttatgttgggataaatgtgtggagaagccagggaatcgcctagactctcgcactgaaaattgtctctccagacctcggccgcgaccacgcta

SEQ ID NO: 58 - DNA, 193 bp, Homo sapiens
attttcagtgcgagagtctaggcgattccctggcttctccacacatttatcccaacataactccatgaagtgatgcacctgtgcagtaaactgcgccttctgctgctcggcggccaccaggcgctgcaactccgcttcatcggcttcgcccagctccgccattgttcgccacctgcccgggcggccgctcgaa

SEQ ID NO: 59 - DNA, 229 bp, Homo sapiens
cgcaactctcgagcatttatatacaatagcaaatcatccagtgtgttgtacagtctataatactccaacagtctcccatctgtattcaatggcgccacccaatacagtcctttgtttggatgctggggagagtaatccctaccccaagcaccatatagataagaaaaccctctccagttgagctgaaccacagacggtttgctgatacctgcccgggcggccgctcgaa

SEQ ID NO: 60 - DNA, 340 bp, Homo sapiens
tcgagcggccgcccgggcaggtcctctaaagatcaaaacacccctgtcgtccaccctcctcccactccagggaagctgtggtcatggtggtgtggtgaacatcagcaaaccgtctgtggttcagctcaactggagagggttttcttatctatatggtgcttggggtagggattactctccccagcatccaaacaaaggactgtattgggtggcgccattgaatacagatgggaaactgttggagtattataaactggtacaacacactggatgatttgctattgtatataaatgctcgagaattgcggatcacctatggacctcggccgcgaccacgctg

SEQ ID NO: 61 - DNA, 179 bp, Homo sapiens
  misc_feature 16, 76, 96, 110, 112, 122, 138, 140, 143, 155, 161, 163,175, 178: n = A,T,C or G
tttttgtgacggacgnttggagtacatgtcccaggatcacatccagcagctagagtggctgggacaagctggcggnggccaagcactgttgaaacnataggggtctgggngnactcgggttnaagtggttggtccgantnttnataaccttgtcngaaccnancatctcggttgncang

SEQ ID NO: 62 - DNA, 78 bp, Homo sapiens
  misc_feature 51, 72: n = A,T,C or G
agggcgttcgtaacgggaatgccgaagcgtgggaaaaagggagcggtggcnggaagacggggatgagcttangacaga

SEQ ID NO: 63 - DNA, 410 bp, Homo sapiens
  misc_feature 48, 95, 182, 290, 314, 350, 365, 380: n = A,T,C or G
cccagttacttggggaggctgaggcagggagaatcctttgaacccggngggtgggaggttgcagtgagcccgagatagcaccattgcacttccancatggggtggacagagtgagactctatctcaaaaaaaaagaaaagaaaaggaaagagattagattaagattaagtacctacttcctntcccatttcaagtcctgaaaatagaggatcagaaatgttgaggaattctttaggatagaaagggagatgggattttacttatggggaaagaccgcaaataaagactgnaacttaaccacattccccaagtgnaaggtgttacccaagaagtaggaacccttttggctnttaccttaccttccngaaaaaaacttattncttaaaatggaaacccttaaagcccgggca

SEQ ID NO: 64 - DNA, 199 bp, Homo sapiens
  misc_feature 153, 156, 158, 162, 170, 171, 184, 192: n = A,T,C or G
cttgttctcaaaaaggtcaaagggagcccgacgaggaataaatagcaatgccctgaattccaactgaccttctacagaaaagtgcttgactgccaagtggtcttcccagtcattagtgaggctcttgtagaattctccatactcctcttgggngangncatnagggtttnnggcccaaataggntgggcctngttaagt

SEQ ID NO: 65 - DNA, 125 bp, Homo sapiens
  misc_feature 115, 118, 120: n = A,T,C or G
agcggtacagttctgtcctggcatcatcattcattgtagtatggtcaataggtgccatgaaactcagtagcttgctaaggacatgaaaccgaagtttcctgcctttgctggcctngtngngggta

SEQ ID NO: 66 - DNA, 204 bp, Homo sapiens
attcagaattctggcatcggtatttctataaagtccatcagttagagcaggagcaggcccggagggacgccctgaagcagcgggcggaacagagcatctctgaagagcccggctgggaggaggaggaagaggagctcatgggcatttcacccatatctccaaaagaggcaaaggttcctgtggacctcggccgcgaccacgcta

SEQ ID NO: 67 - DNA, 383 bp, Homo sapiens
  misc_feature 32, 46, 59, 132, 190, 234, 264, 272: n = A,T,C or G
tcagggcctccaggcagccagttttgcagganattcagcacctagngtcttcctgcctnacgctcccaagaacctgctcctgcagggggaacatcagaactcgtccttgatgtcaaaatggggctggtcttnaggcttgaagtccaggttagggctgccatcctcattgagaattctccgggcagtgtanccgacgatggggtatttggctttgtacactttggtgaaaacctnatccagggcctccagttccttggccgtganacccgtantgtcatgggtgaggtctgcaggatccaaggacatcttggctacccctctagtggagtccttccccgtcaaggcattgtaaggggctcctcgtccataaaactccttttcgg

SEQ ID NO: 68 - DNA, 99 bp, Homo sapiens
tcacatctccttttttttttaactttttcaaatttttgtgttaaatagaaggctaaagggttagatttaagtttctgctacattgaccctatttaccta

SEQ ID NO: 69 - DNA, 37 bp, Homo sapiens
  misc_feature 10, 16, 21, 24, 27, 29: n = A,T,C or G
gagaaggacntacggncctgntantanangaatctcc

SEQ ID NO: 70 - DNA, 222 bp, Homo sapiens
  misc_feature 196: n = A,T,C or G
gtgggtcatttttgctgtcaccagcaacgttgccacgacgaacatccttgacagacacattcttgacattgaagcccacattgtccccaggaagagcttcactcaaagcttcatggcgcatttcgacagattttacttccgttgtaacgttgactggagcaaaggtgaccaccataccgggtttgagaacacccantcacctgccccgggcggccgctcgaa

SEQ ID NO: 71 - DNA, 428 bp, Homo sapiens
  misc_feature 281, 308, 364, 376, 383, 397, 413, 420: n = A,T,C or G
caggagtattttgtagaaaagccagaagagcattagtagatgtatggaaatatacggtagggcacacgctgacagtacttttcccaagccacgccgtatttcttcttacagtggtactcgtcacgagcttctcggtggacaagcaacatggtgaaataaattatgtagaaataaggcagaatgtggttaaaaccacatgggagggaccacgccaaggccatgatgagatcacccaagtaattggggtggcgaacaaagccccaccatccagaaactagaanaatttttcccgttgaaatatgaatggnttttaaatgtgcaagctttggatcactgggaattttcccgaatgcctttttctganaattgcaccttnggaagantccttaccccaagnttcagaccattatttnaaaagcnttggaact

SEQ ID NO: 72 - DNA, 264 bp, Homo sapiens
  misc_feature 218, 236, 247, 256: n = A,T,C or G
gaataaagagcttactggaatccagcagggttttctgcccaaggatttgcaagctgaagctctctgcaaacttgataggagagtaaaaagccacaatagagcagtttatgaagatcttggaggagattgacacacttgatcctgccagaaaatttcaaagacagtagattgaaaaggaaaggctttggtaaaaaaaggttcaggcattcctagccgantgtgacacagtggagcanaacatctgcangagactgancggctgca

SEQ ID NO: 73 - DNA, 442 bp, Homo sapiens
  misc_feature 249, 283, 313, 385, 390, 407: n = A,T,C or G
ggcgaatccggcgggtatcagagccatcagaaccgccaccatgacggtgggcaagagcagcaagatgctgcagcatattgattacaggatgaggtgcatcctgcaggacggccggatcttcattggcaccttcaaggcttttgacaagcacatgaatttgatcctctgtgactgtgatgagttcagaaagatcaagccaaagaacttcaaacaagcagaaagggaagagaagcgagtcctcggtctggngctgctgccaagggagaatctggtctcaatgacngtagaaggaccttcttccaaagatactggnattgctcgagttccacttgctggaacttcccggggcccaaggatcgcaaggcttctggcaaaagaaatccanacttnggccgggaccacctaanccaattcacacactggcggccgtactagtggatcc

SEQ ID NO: 74 - DNA, 337 bp, Homo sapiens
  misc_feature 167, 268: n = A,T,C or G
ggtagcagcgtctccagagcctgatctggggtcccagatacccaggcagcagcagccctggaggtaaagggcaagctccccaatgtgaggggagaccccattcctggtcagccaggctttcagaggagatagcaggtcgagggagccaacgaagaagagactgccancaggggaaggactgtcccgccaaggacagaactgattcaggggggtcaatgctcctctagagaagagccacacagaactggggggtccaggaaccatgaancttggctgtggtctaaggagccaggaatctggacagtgttctgggtcataccaggattctggaattgta

SEQ ID NO: 75 - DNA, 588 bp, Homo sapiens
  misc_feature 444, 495, 531, 562: n = A,T,C or G
catgatgagttctgagctacggaggaaccctcatttcctcaaaagtaatttatttttacagcttctggtttcacatgaaattgtttgcgctactgagactgttactacaaactttttaagacatgaaaaggcgtaatgaaaaccatcccgtccccattcctcctcctctctgagggactggagggaagccgtgcttctgaggaacaactctaattagtacacttgtgtttgtagatttacactttgtattatgtattaacatggcgtgtttatttttgtatttttctctggttgggagtatgatatgaaggatcaagatcctcaactcacacatgtagacaaacattagctctttactctttctcaaccccttttatgattttaataattctcacttaactaattttgtaagcctgagatcaataagaaatgttcaggagagangaaagaaaaaaaatatatgttccccatttatatttagagagagacccttantcttgcctgcaaaaagtccacctttcatagtagtangggccacatattacattcagttgctataggncagcactgaactgcattacctgggca

SEQ ID NO: 76 - DNA, 196 bp, Homo sapiens
gcggtatcacagcctggcccccatgtactatcggggggcccaggctgccatcgtggtctatgacatcaccaacacagatacatttgcacgggccaagaactgggtgaaggagctacagaggcaggccagccccaacatcgtcattgcactcgcgggtaacaaggcagacctggacctgcccgggcggccgctcgaa

SEQ ID NO: 77 - DNA, 458 bp, Homo sapiens
  misc_feature 196, 335, 409, 410, 417, 442, 447, 450: n = A,T,C or G
agtagagatggggtttcactgtgttaaccaggatggtcttgatctcctggcctcgtgatctgcccgcctcggcctcccaaagtgttgggattacaggcgtgaaccaccgcacccggccagaaatgttagtttttccctattctctctcctttttcctattatatacttggtcaaccagacagccatcctaccccanaatggtaatgcctcttcattcctcatatgagggaataaaagagaaaaaagcttttggaaaacatccacttatctaatcatcccaaatatgtaatcaaaagtatacaactcatgtgaagaatacactggtaaaatgttantataggccaaggtatcttgaattcctatatagaaagctggtaaatgcccttttggctggaaccgccatcttccnntaattcncccaaaatgaccaaacacaaagggnaaganganaagccccc

SEQ ID NO: 78 - DNA, 464 bp, Homo sapiens
  misc_feature 376, 397, 442, 454: n = A,T,C or G
tccgcaaatttcctgccggcaaggtcccagcatttgagggtgatgatggattctgtgtgtttgagagcaacgccattgcctactatgtgagcaatgaggagctgcggggaagtactccagaggcagcagcccaggtggtgcagtgggtgagctttgctgattccgatatagtgcccccagccagtacctgggtgttccccaccttgggcatcatgcaccacaacaaacaggccactgagaatgcaaaggaggaagtgaggcgaattctggggctgctggatgcttacttgaagacgaggacttttctggtgggcgaacgagtgacattggctgacatcacagttgtctgcaccctgttgtggctctataagcaggntctagaaccttcttttcgcangaccttcggccggaccacgcttaacccaaattccacacacttgcnggccgtactaanggaatcccac

SEQ ID NO: 79 - DNA, 380 bp, Homo sapiens
  misc_feature 164, 188, 350: n = A,T,C or G
ctgtatgaccagtttttccatctccttcacttctaccttgatcagctcgaagtccagttcagtgtaagaaatggtatccttctccatgatgtcaattcggacagttaggtttaacagtttcttttcatacacactaattaattggacatattccctcactttanaaagttctttctcaaacttctganaaaagaacatgaactgtgaattccaagcgttcccactctgtccacgggaaaaggtggtgtctggcagggaaacagaacactggcaggtccacggtcatccacggagccggtgaaattgggaaaacaactgggacacagaacctccgctgcctaagctgcggntgggagcttggaacccgacctggaactgga

SEQ ID NO: 80 - DNA, 360 bp, Homo sapiens
  misc_feature 42, 130, 131, 134, 200, 210, 226, 243, 257, 273, 278, 295,303, 316, 337, 344, 357, 360: n = A,T,C or G
tcgagcggccgcccgggcaggtcctcagagagctgtttgttncgcttcttcaaaaactcctattctccacttctgctaaaggactggatgacatcaattgtgatagcaatatttgtgggtgttctgtcanncancatcgcactcctgaacaaagtagatgttggattggatcagtctctttccacccagatgactcctanatggtggatnatttcaaatccatcantcagtacctgcatgcgnggtccgcctgtgtnctttgtcctgcaggangggcnctactacacttcttccnaggggcanaacatggtgtgcngcggccatgggctggcaacantgattcnctgctgcacccanatn

SEQ ID NO: 81 - DNA, 440 bp, Homo sapiens
  misc_feature 121, 132, 191, 211, 224, 312, 342, 354, 360, 407, 412, 427: n = A,T,C or G
acgtggtccggcgagtctgacctgcagatatgaactccttgggaaacctacattctgcctcagacatactgggggcaaatggctttaaaagtctggctcagggagccaagattacagaaanccgttgagtcnccatacatggacactgacaaaggaactgaagatatccaaacaagccctcctggtcccgngcctgcataaagatcgggancggaacggtaccngacgtctgtggtcaggggttgtggaaaattggaaaaaaccagtcctgcccacattgacagggaagcctcaacggaaattgaacagatngtcttatcaccagtctcccctcctggatcntgtctcggctcnggggantcagtgatcagtcctttcaggtggaagaagcaaagaagatcaacaanaagcngatcctctcacctgntaccagcatatgg

SEQ ID NO: 82 - DNA, 264 bp, Homo sapiens
  misc_feature 18, 54, 130, 137, 162, 175, 184, 190, 192, 202, 206, 213,218, 241, 260: n = A,T,C or G
agcgtggtcgcggccgangtcctgacattcctgccttcttatattaattatacnaataaaacaaaatagtgttgaagtgttggagcggcgaaaatttttggggggtggtatggacagagaatgggcgatnttctcanggctgcttcaagtgggattggggcngcgtgggatcatncagtggganagattncnctgaccggantctnttggtanggatnatcttgtggggatgtgcaagagncattcgtctcctgaatgantggt

SEQ ID NO: 83 - DNA, 410 bp, Homo sapiens
  misc_feature 2, 18, 169, 209, 245, 263, 265, 284, 378: n = A,T,C or G
ancgtggtcgcggccgangtccacagttgtgggagagccagccattgtgggggcagctccacaggtaagactcgtgtcctgagcagcgcacatcatccaggacaatgggtcctgagccctgaccaaaccgggcatttcctggggctgacatggcccagccacagcccanttgcctgcagacgaaattggcatcattggtgtcccagtantcatcacacacggtgccccaggaacctccggtatangaactccactcggcctcnanacctgtcgcctccattccncagcctcagggggcaaactgggattcagatccttctgtgggtacaggtggtgatatcctgacaggccaactttctggcctgagtgttgactgangctgggcagacctgcccgggcggccgctcgaa

SEQ ID NO: 84 - DNA, 320 bp, Homo sapiens
  misc_feature 61, 81, 82, 90, 98, 111, 153, 182, 184, 187, 189, 198, 210,211, 212, 238, 262, 277, 279, 289, 295, 299, 318, 320: n = A,T,C or G
tcgaacggccgcccgggcaggtctgccccaggtgtatccatttgccgccgatctctatcanaaggagctggctaccctgcnncgacgaantcctgaanataatctcacccncccagatctctctgtcgcaatggagatgtcgtcatcggtggncctgatcacagggcattggactcagaganangtnancacagtgtngaagcgattgannnagttcagttgctggtcttacccgatnttggaaggaaggaaaacgtgttangacgtatctcgatgnanttgaccaaanctgaangctncagggggcatcgcaaaganan

SEQ ID NO: 85 - DNA, 218 bp, Homo sapiens
  misc_feature 117, 120, 152, 155, 193, 194: n = A,T,C or G
tcgagcggccgcccgggcaggtctgctgcccgtgctggtgccattgccccatgtgaagtcactgtgccagcccagaacactggtctcgggcccgagaagactcctttctccaggctntangtatcaccactaaaatctccaggggcaccatnganatcctgggtgtccgcaatgttgccaatgtctgtccgcnnattggctacccaactgttgcatca

SEQ ID NO: 86 - DNA, 283 bp, Homo sapiens
  misc_feature 25, 183, 193, 204, 225, 240: n = A,T,C or G
tcgacttcttgtgaaggttttgganaaatatgtatcagttcgttttatttgggtattcaataatatccttggtgataatgctgactccatggcttctgaccccaaaaattgaccctgctgccactggttgtagccctgagattgatttttgtagccacgattgtttcctcgtcctctgaagtnctggttgtanttccctctgtngggcattcccctctgttgtanttccctctgtttgantaactaccacggccaggaaaaacaggggcacgaaggtatggat

SEQ ID NO: 87 - DNA, 179 bp, Homo sapiens
  misc_feature 66, 81, 89, 113, 120, 135, 148, 161: n = A,T,C or G
agcgtggtcccggccgatgtctttctgtgtaagtgcataacactccacatacttgacatccttcangtcacgggccagctnttcagcantctctggagtgataggctactgtntgttctnggcaagtgtctcaanaatacaggggtcntctctgagatgantttcagtcccgaaccctc

SEQ ID NO: 88 - DNA, 512 bp, Homo sapiens
  misc_feature 27, 30, 75, 106, 198, 216, 294, 349: n = A,T,C or G
tcgagcggccgcccgggcaggtcctancanagaatcaccaaatttatggagagttaacaggggtttaacaggaangaagtgcctttagtaagttctcaagccagangctggaggcagcagctaaatcagaggacaggatcctcagtgaaagtgagccattcggggtggcatgtcactccaggaataagcacaacttanaaacaaatgatttcgtangatagcacagtgacattggtgcacttgtgaacctgaggccactgtgtcaaactgtgcactggttgtgaatagggaganccaaaaattatgtcctactgggtaatgagctttcaatgggctcgatcctctcacnctgaaagctctgtagagcagctcagaaccacaaccactcccaacattgacccttctgggggtactgtctgtggcacccacaggaaggagctggagatccccattaggactgtccacccacacttgaagccacaaaactgcacctcggccgcgaccaccgctta

SEQ ID NO: 89 - DNA, 358 bp, Homo sapiens
  misc_feature 65, 207, 214, 221, 257, 258, 266, 271, 287, 297, 307, 308,325: n = A,T,C or G
tcgagcgggccgcccgggcaggtctgccagtccccatcccagacattctttgcatctaagctgangtctgaactgagtggggtgggctggtgtttccatcctcacaactccagtgagccgggtgtggccgtggcctgcgtctctctggcggttagtgatgttggcatcatccacctttttcaaaacaaaagcactggactgaagaanaatcccnccctgtntccacccagtccatggtttttaataaaagggttatnnaagttgancaagncatcaccacacacaancctaagaacntttttcatcnntccccaaaacaaacccncaccctgggaactccgggcgcgaaccacgccta

SEQ ID NO: 90 - DNA, 250 bp, Homo sapiens
  misc_feature 125, 163, 172, 199, 244: n = A,T,C or G
cgagcggccgcccgggcaggtctggatggggagacggactggaactgcggcttcccgtggcctgcacgcacaaggctccccacggccgccgaccttcttcagattcgatcgtatgtgtacgcacnaagagccaaatattgacattcacaacttcgtgggaatnttaccccanaagactgcgaccccccgatcaggcganagcctgagcatagaagaacaccgctgtgggcttggcactgtgggncccatc

SEQ ID NO: 91 - DNA, 133 bp, Homo sapiens
  misc_feature 12, 56, 58, 61, 78, 82, 107, 116, 123, 126: n = A,T,C or G
tcgagcggccgnccgggcaggtcccgggtggttgtttgccgaaatgggcaagttcntnaancctgggaaggtggtgcntgtnctggctggacgctactccggacgcnaagctgtcntcgtgangancattgat

SEQ ID NO: 92 - DNA, 232 bp, Homo sapiens
  misc_feature 18, 168, 173, 179, 219: n = A,T,C or G
agcgtggtcgcggccgangtctgtcactttgcgggggtagcggtcaattccagccaccagagcatggctgtaggggcgatctgaggtgccatcatcaatgttcttcacgatgacaagctttgcgtccggagtagcgtccagccaggacaagcaccaccttcccacgtnttcangaactngcccatttcggcataaccacccgggacctgcccgggcggncgctcgaaaagcc

SEQ ID NO: 93 - DNA, 480 bp, Homo sapiens
  misc_feature 19, 27, 221, 406, 439: n = A,T,C or G
agcgtgggtcgcggccgangtctgtangctcaccggccagagaagaccactgtgagcattttgccgtatatcctgccctgccatttgttcactttttaaactaaaataggaacatccgacacacaccgtttgcatcgtcttctcccttgatattttaagcattttcccatgtcgtgagtttctcagaaacatgtttttaacaattgtactatttagtcatngtccatttactataatttatctgaccatttccctactgttaaaatacttaagacggtttctgatttttccactatttaaataatgctgtgatgaatatctttaaaatcttctgatttcttacttttttcccccttagatgcctggaagtggtattttgaggtgaaagagtttgttcattttgaanatatttctgtctctctctcgacctgatgtgtanacgctcacttccagttagcagaaccaccttagtttgtgtct

SEQ ID NO: 94 - DNA, 472 bp, Homo sapiens
  misc_feature 9, 33, 70, 105, 129, 135, 136, 154, 180, 190, 213, 232, 235,286, 292, 293, 305, 335, 341, 363, 372, 400, 418, 422, 425,472: n = A,T,C or G
tcgagcggncgcccgggcagggtctgatgtcantcacaacttgaagggatgccaatgatgtaccaatccnatgtgaaatctctcctcttatctcctatgctgganaagggattacaaagttatgtggcngataannaattccatgcacctctantcatcgatgagaatggagttcatganctggtgaacnatggtatctgaacccgataccangttttgtttgccacgatangantagcttttatttttgatagaccaactgtgaacctaccacacgtcttggacnactganntctaactatccncagggttttattttgcttgttgaactcttncagctnttgcaaacttcccaagatccanatgactgantttcagatagcatttttatgattcccanctcattgaaggtcttatntatntcnttttttccaagccaaggagaccattggacctcggccgcgaccacctn

SEQ ID NO: 95 - DNA, 309 bp, Homo sapiens
  misc_feature 97, 117, 139, 173, 184, 193, 206, 230, 236, 239, 242, 265,280, 299: n = A,T,C or G
tcgagcggccgcccgggcagagtgtcgagccagcgtcgccgcgatggtgttgttggagagcgagcagttcctgacggaactgaccagacttttccanaagtgccggacgtcgggcancgtctatatcaccttgaagaantatgacggtcgaaccaaacccattccaaagaaangtactgtgganggctttgancccgcagacaacnagtgtctgttaagaactaccgatnggaaanaanaanatcagcactgtgggtgagctccnagggaagttaataantttcggatgggcttattcnaacctcctta

SEQ ID NO: 96 - DNA, 371 bp, Homo sapiens
  misc_feature 327: n = A,T,C or G
tcgagcggccgcccgggcaggtccaccactcacctactccccgtctctatagatttgcctgttctgggcagttctcagcaatggaatcctactgtgtatctttttgtgactggttctttaactcagcatcacattttcaaggttcatccatgctgcagcctggctccgtactggtgacagtacttcatttctctctcccttttgttcagaccaaggtctccctctgtccccaaggctaaagtgcagttggtgtgatcatggctcactgcagcctcaaactcctggactcaaacagtcctcccatctcagcctcccaaagtgctgatnttataagttgcaagccctgcacccagcctgtatctccagtttgt

SEQ ID NO: 97 - DNA, 430 bp, Homo sapiens
  misc_feature 5, 25, 30, 34, 41, 42, 43, 44, 46, 60, 97, 116, 141, 145,158, 183, 184, 226, 232, 243, 245, 257, 271, 288, 298, 300,303, 308, 318, 325, 329, 354, 390, 428: n = A,T,C or G
tcgancggccgcccgggcaggtttnttttntttnttttttnnnngntagtatttaaaganatttattaaatcatcttatcaccaaaatggaaacatnttccaactagaaacatgcnaccatcatcttccccagtccagtcncaangtccaatattttncttgcctctgcagataaaaagttcnnatttttatacccactcttactcccccccaaaattttaattcngtcctnccctaaaattncnccgggtaacaanttaccaaaatggcnaaccaattattttaaanaaaagttgcncnttnaaaanggaaactttntggcaanttancctcttttcccttcccaccccccantttaaggggaaaacaatggcactttgctcttgcttnaacccaaaattgtcttccaaaaactattaaaaatgttnaa

SEQ ID NO: 98 - DNA, 307 bp, Homo sapiens
  misc_feature 3, 15, 19, 20, 25, 28, 43, 70, 75, 81, 102, 139, 162, 203,259, 260, 283, 295: n = A,T,C or G
tcnaacggccgcccnggcnngtctngcngcacctgtgcctcanccgtcgatacctggtcgattgggacanggaanacaatntggttttcagggaggccacanatttggagaaacggatgaattctcctttattccgaantcagctccttggtctccgtaganggtgatcttgaaattctcctgttttgaaaactttcttgaanaaaccttacctgctggttgtatttggtctcccactcggacaagtactcgttatccnnggtactcttaatgtgcccacgtnaactccccgggntggcaactggaa

SEQ ID NO: 99 - DNA, 207 bp, Homo sapiens
  misc_feature 5, 19, 24, 25, 38, 46, 59, 61, 66, 69, 81, 83, 88, 96, 98,104, 106, 115, 126, 132, 135, 146, 152, 160, 165, 172, 173,187, 188, 189, 192, 202, 203: n = A,T,C or G
gtccnggaccgatgttgcnaaganntttcttggtccantaggttcnaaaaaatgataancnaggtntancacgtgaagatntntatanagtcttantnaaaacncntagatctgnatgacgataantcgaanacngggggaggggntgaggngaggtggngtganggaaganntgttgataaaagannnagntgataagaanngagc

SEQ ID NO: 100 - DNA, 200 bp, Homo sapiens
  misc_feature 3, 5, 6, 14, 21, 23, 29, 46, 71, 150, 151, 166, 176, 185,186, 195: n = A,T,C or G
acntnnactagaantaacagncnttctangaacactaccatctgtnttcacatgaaatgccacacacatanaaactccaacatcaatttcattgcacagactgactgtaattaattttgtcacaggaatctatggactgaatctaatgcnnccccaaatgttgttngtttgcaatntcaaacatnnttattccancagat

SEQ ID NO: 101 - DNA, 51 bp, Homo sapiens
  misc_feature 35: n = A,T,C or G
tcgagcggccgcccgggcaggtctgaccagtgganaaatgcccagttattg

SEQ ID NO: 102 - DNA, 385 bp, Homo sapiens
  misc_feature 50, 145, 202, 214, 306, 362: n = A,T,C or G
aacgtggtcgcggccgaagtccatggtgctgggattaatccactgtgacngtgactctgagttgagttgtttttcaatcttctccaagcctgtggactcatcctccacatccttgggtagtaggatgaacatgctgaagatgctnattttgaaaaggaactctatgaatcttacaattgaatactgtcaatgtttccccatnacagaacgtggncccccaaggttccatcatctgcactgggtttgggtgttctgtcttggttgactcttgaaaagggacatttctttttgttttcttgaattcanggaaattttcttcatccactttgcccacaaaagttaggcagcatttaacccccaanggattttgggtctgggtccttcc

SEQ ID NO: 103 - DNA, 189 bp, Homo sapiens
  misc_feature 72, 138, 156: n = A,T,C or G
agcgtggtcgcggccgaagtctgcagcctgggactgaccgggaagctctgattatttacccaccacaggtangttgtgttctgaatctcaagttcacaggttaaggctacagcatcctcatcctccacggggttgganttgttgctggtgatgaanggtttggggtggctctgcataactgttgatctc

SEQ ID NO: 104 - DNA, 181 bp, Homo sapiens
  misc_feature 38, 82, 83, 97: n = A,T,C or G
tcgagcggccgcccgggcaggtccaggtctccaccaangcaccaccgtgggaagctggtaattgatgcccaccttgaagccnntggggcaccatccnccaactggatgctgcgcttggttttgatggtggcaatggcacattgactcttttgggaaccacttcaccacggtacaacaggca

SEQ ID NO: 105 - DNA, 327 bp, Homo sapiens
  misc_feature 80, 116, 167, 175, 182, 194, 210, 277: n = A,T,C or G
tcgagcggccgcccgggcaggtcttctgtggagtctgcgtgggcatcgtgggcagtggggctgccctggccgatgctcanaaccccagcctctttgtaaagattctcatcgtgganatctttggcagcgccattggcctctttggggtcatcgtcgcaattcttcanacctccanaatgaanatgggtgactanataatatgtgtgggtngggccgtgcctcacttttatttattgctggttttcctgggacagaactcgggcgcgaacacgcttanccgaattccaacacactggcgggcgttactagtggatccgagctcggtac

SEQ ID NO: 106 - DNA, 268 bp, Homo sapiens
  misc_feature 18, 73, 96, 117, 129, 161, 195, 219, 247, 250, 255, 257: n = A,T,C or G
agcgtggtcgcggccgangtctggcgtgtgccacatcggtcccacctcgctttacaaaacagtcctgaacttnatctaataaaattattgtacacnacatttacattagaaaaaganagctgggtgtangaaaccgggcctggtgttccctttaagcgaangtggctccacagttggggcatcgtcgcttcctcnaagcaaaaacgccaatgaaccccnaagggggaaaaaggaatgaaggaactgnccngggangnccgctccgaaa

SEQ ID NO: 107 - DNA, 353 bp, Homo sapiens
  misc_feature 70, 167, 179, 184, 185, 196, 198, 215, 216, 221, 235, 286,288, 299, 312, 321, 335, 344: n = A,T,C or G
tcgagcggccgcccgggcaggtggccaggccatgttatgggatctcaacgaaggcaaacacctttacacnctagatggtggggacatcatcaacgccctgtgcttcagccctaaccgctactggctgtgtgctgccgcaggccccagcatcaagatctgggatttanagggaaagatcnttgtnnatgaactgaancntaaattatcagttccannaccangcaaaaaccacccngtgcactccctggcctggtctgctgatgggacctcgggcgcgaacacgctnancccaattccancacactgggcggncgttactantggatccgaactcnggtaccaancttggcgtt

SEQ ID NO: 108 - DNA, 360 bp, Homo sapiens
  misc_feature 61, 121, 145, 194, 202, 217, 237, 252, 254, 275, 279, 318,330, 343, 346, 352: n = A,T,C or G
agcgtggtcgcggccgaagtcctggcctcacatgaccctgctccagcaacttgaacagganaagcagcagctacatccttaaggtccggaaagttagatgaagatttggatcctgcattgncctgcctcccacctatctctcccnaattataaacagcctccttgggaagcagcagaatttaaaaactctcccnctgccctnttgaactacacaccnaccgggaaaacctttttcanaatggcacaaaaatncnagggaatgcatttccatgaangaanaaactgggttacccaaaattattgggttggggaaatccngggggggttttnaaaaaagggcaanccnccaaanaaaaaaac

SEQ ID NO: 109 - DNA, 101 bp, Homo sapiens
  misc_feature 10, 47, 77, 82: n = A,T,C or G
atcgtggtcncggccgaagtcctgtgtcctggatgggccgtgtgcancgaatccgttggcgactcctaactaccaanaaaangactctcggaagaaatttc

SEQ ID NO: 110 - DNA, 300 bp, Homo sapiens
  misc_feature 4, 56, 116, 130, 236, 243, 246, 248, 271, 276, 280: n = A,T,C or G
ccanggaaacccagagtcacatgagatagggtggctttcgggacagggggtcagangaatggtacatggatctcagcccctgatggacacggaacaggtgtggtcagaactcccangattctgcatccangatccagtctctatagaagttatggatcattccttcatttcattccccccttcatgaaaaaacttctgaacaagccttttttctcactttggggccctgtttggcncaaggtnttnanttggggaaaaaaaaacaaatccnttccnttanccctccgtggggaatgacct

SEQ ID NO: 111 - DNA, 366 bp, Homo sapiens
  misc_feature 42, 65, 90, 180, 250, 257, 264, 296, 333, 337: n = A,T,C or G
cgagcggccgcccgggcaggtccttgtgttgccatctgttancattgatttctggaatggaacanctttctcaaagtttggtcttgctantcatgaagtcatgtcagtgtcttaagtcactgctgctcacttccttacccagggaatatactgcataagtttctgaacacctgttttcantattcactgttcctctcctgcccaaaattggaagggacctcatttaaaaatcaaatttgaatcctgaaanaaaaacnggaaatntttctcttggaatttggaatagaattattcanttgaataacatgttttttccccttgccttgctcttcncaanaacatctggacctcggccgcgacacctta

SEQ ID NO: 112 - DNA, 405 bp, Homo sapiens
  misc_feature 7, 23, 29, 52, 119, 136, 139, 147, 172, 204, 232, 247, 320,323, 324, 362, 386: n = A,T,C or G
ctgactnctaaacttctaattcnatcaanataactactctccttccgtcttncagagtgttcacaataaatctgtgaatctggcatacacagttgctggaaaattgttcttcctccacnaaaaggtcaattgttcnccncatgaaanaagataaattgttcatccatcactnctgaaccatccaaaacgccggcggaattattnccccgttattatggggaacggaattttnaataaatttgggaangaatggggcttttattgttttgttttccccctttcttggcattgattgggccgcaatgggccccctcgctcanaanntgccccggggccggccgctccaaaaccgaaattcccanccacacttggcgggccgttactanttggatccgaactcggtta

SEQ ID NO: 113 - DNA, 401 bp, Homo sapiens
ggatagaagagtatatgggtttggcaccacggggtggataggcaaaacatttggttgataaggcgcagattctgaactaacttgtaaggcttgtctggttttaggacaggtaaaatgggggaatggtaaggagagtttataggttttaggagcccatgctgtagcaggcaagtgataacaggctttaatcctttcaaagcatgctgtgggatgagatattggcatttgagcggggtaagggtgattaggttttaatgagatggtaaggggtgcatgatccggtccgccaaggaagggaagtagaggtatcttatacttgtggggttaaggtgggggggatataagagggaggacgccaaaggaggctttggattaggaataaggggcggcaatgagatgca

SEQ ID NO: 114 - DNA, 401 bp, Homo sapiens
  misc_feature 2, 13, 17, 37, 277, 303, 318, 324, 381: n = A,T,C or G
angtccacaggangcangaggccaggctccgtcccanccagtccatgatgttgaagaggaggaagcagcacatggggttgaagaactgactccacttcccaggactggtggagctggtcaccatggctgtggtggcggggaagacggacagggtgacttctggaagacagtgaagactgaaggttttcctggcttctggggctcatctggctctgattccggctccttctccaggtcaagatccagggttcagagctactttcttgggggactactngggaatcccgttctcatctgggggtngaggggggacggggnaagggncatgcttgtgacccaggtttcccacctcggcccgcgaccacgctaaggcccgaattncagcacacttggcggcccgt

SEQ ID NO: 115 - DNA, 401 bp, Homo sapiens; identical to SEQ ID NO: 44

SEQ ID NO: 116 - DNA, 301 bp, Homo sapiens
  misc_feature 1, 12, 13, 33, 34, 88, 89, 90, 104, 106, 116, 121, 131, 142,147, 150, 160, 164, 166, 175, 197, 251, 285, 298: n = A,T,C or G
ngatttaattgnnagcttctttttaatggaatnnttggctaaaatgaattgatgattatgaatatccctaggaggagttagcatggannntgatcattttcttngnactcctttangacanggaaacaggnatcagcatganggtancanaaaccttatnaccnangcgcacganctgacttcttccaaagagttgnggttccgggcagcggtcattgccgtgcccattgctggagggctgattctagtgntgcttattatgctggccctgaggatgcttccaanatgaaaataagangct

SEQ ID NO: 117 - DNA, 383 bp, Homo sapiens; identical to SEQ ID NO: 27
  misc_feature 32, 38, 49, 100, 142, 147, 181, 250, 258, 272, 274, 297,340, 341, 366, 368, 377: n = A,T,C or G

SEQ ID NO: 118 - DNA, 301 bp, Homo sapiens
ctgctagaatcactgccgctgtgctttcgtggaaatgacagttccttgttttttttgtttctgtttttgttttacattagtcattggaccacagccattcaggaactaccccctgccccacaaagaaatgaacagttgtagggagacccagcagcacctttcctccacacaccttcattttgaagttcgggtttttgtgttaagttaatctgtacattctgtttgccattgttacttgtactatacatctgtatatagtgtacggcaaaagagtattaatccactatctctagtgcttgac

SEQ ID NO: 119 - DNA, 401 bp, Homo sapiens
taaggacatggacccccggctgattgcatggaaaggaggggcagtgttggcttgtttggatacaacacaggaactgtggatttatcagcgagagtggcagcgctttggtgtccgcatgttacgagagcgggctgcgtttgtgtggtgaatggggaggaaatgtcactgccgaagaccaaaaacaagcttcttggtataaaagactcttacagaatatgtgtattgtaatttattgatctggatgcttaagtgtcatggacagtaaatgaatttgaactttatgtttgaggacatgacattgggtttgaaaatataaactgcttttgagcagtttaagtcagggcatttgagaataaaataggaactttctcttcagtttgtaaaactctcttgccctctct

SEQ ID NO: 120 - DNA, 301 bp, Homo sapiens
tccagagataccacagtcaaacctggagccaaaaaggacacaaaggactctcgacccaaactgccccagaccctctccagaggttggggtgaccaactcatctggactcagacatatgaagaagctctatataaatccaagacaagcaacaaacccttgatgattattcatcacttgggtgagtgcccacacagtcaagctttaaagaaagtgtttgctgaaaataaagaaatccagaaattggcagagcagtttgtcctcctcaatctggtttatgaaacaactgacaaacacctttctc

SEQ ID NO: 121 - DNA, 2691 bp, Homo sapiens
gcttgcccgtcggtcgctagctcgctcggtgcgcgtcgtcccgctccatggcgctcttcgtgcggctgctggctctcgccctggctctggccctgggccccgccgcgaccctggcgggtcccgccaagtcgccctaccagctggtgctgcagcacagcaggctccggggccgccagcacggccccaacgtgtgtgctgtgcagaaggttattggcactaataggaagtacttcaccaactgcaagcagtggtaccaaaggaaaatctgtggcaaatcaacagtcatcagctacgagtgctgtcctggatatgaaaaggtccctggggagaagggctgtccagcagccctaccactctcaaacctttacgagaccctgggagtcgttggatccaccaccactcagctgtacacggaccgcacggagaagctgaggcctgagatggaggggcccggcagcttcaccatcttcgcccctagcaacgaggcctgggcctccttgccagctgaagtgctggactccctggtcagcaatgtcaacattgagctgctcaatgccctccgctaccatatggtgggcaggcgagtcctgactgatgagctgaaacacggcatgaccctcacctctatgtaccagaattccaacatccagatccaccactatcctaatgggattgtaactgtgaactgtgcccggctcctgaaagccgaccaccatgcaaccaacggggtggtgcacctcatcgataaggtcatctccaccatcaccaacaacatccagcagatcattgagatcgaggacacctttgagacccttcgggctgctgtggctgcatcagggctcaacacgatgcttgaaggtaacggccagtacacgcttttggccccgaccaatgaggccttcgagaagatccctagtgagactttgaaccgtatcctgggcgacccagaagccctgagagacctgctgaacaaccacatcttgaagtcagctatgtgtgctgaagccatcgttgcggggctgtctgtagagaccctggagggcacgacactggaggtgggctgcagcggggacatgctcactatcaacgggaaggcgatcatctccaataaagacatcctagccaccaacggggtgatccactacattgatgagctactcatcccagactcagccaagacactatttgaattggctgcagagtctgatgtgtccacagccattgaccttttcagacaagccggcctcggcaatcatctctctggaagtgagcggttgaccctcctggctcccctgaattctgtattcaaagatggaacccctccaattgatgcccatacaaggaatttgcttcggaaccacataattaaagaccagctggcctctaagtatctgtaccatggacagaccctggaaactctgggcggcaaaaaactgagagtttttgtttatcgtaatagcctctgcattgagaacagctgcatcgcggcccacgacaagagggggaggtacgggaccctgttcacgatggaccgggtgctgacccccccaatggggactgtcatggatgtcctgaagggagacaatcgctttagcatgctggtagctgccatccagtctgcaggactgacggagaccctcaaccgggaaggagtctacacagtctttgctcccacaaatgaagccttccgagccctgccaccaagagaacggagcagactcttgggagatgccaaggaacttgccaacatcctgaaataccacattggtgatgaaatcctggttagcggaggcatcggggccctggtgcggctaaagtctctccaaggtgacaagctggaagtcagcttgaaaaacaatgtggtgagtgtcaacaaggagcctgttgccgagcctgacatcatggccacaaatggcgtggtccatgtcatcaccaatgttctgcagcctccagccaacagacctcaggaaagaggggatgaacttgcagactctgcgcttgagatcttcaaacaagcatcagcgttttccagggcttcccagaggtctgtgcgactagcccctgtctatcaaaagttattagagaggatgaagcattagcttgaagcactacaggaggaatgcaccacggcagctctccgccaatttctctcagatttccacagagactgtttgaatgttttcaaaaccaagtatcacactttaatgtacatgggccgcaccataatgagatgtgagccttgtgcatgtgggggaggagggagagagatgtactttttaaatcatgttccccctaaacatggctgttaacccactgcatgcagaaacttggatgtcactgcctgacattcacttccagagaggacctatcccaaatgtggaattgactgcctatgccaagtccctggaaaaggagcttcagtattgtggggctcataaaacatgaatcaagcaatccagcctcatgggaagtcctggcacagtttttgtaaagcccttgcacagctggagaaatggcatcattataagctatgagttgaaatgttctgtcaaatgtgtctcacatctacacgtggcttggaggcttttatggggccctgtccaggtagaaaagaaatggtatgtagagcttagatttccctattgtgacagagccatggtgtgtttgtaataataaaaccaaagaaacata

SEQ ID NO: 122 - protein, 683 aa, Homo sapiens
MALFVRLLALALALALGPAATLAGPAKSPYQLVLQHSRLRGRQHGPNVCAVQKVIGTNRKYFTNCKQWYQRKICGKSTVISYECCPGYEKVPGEKGCPAALPLSNLYETLGVVGSTTTQLYTDRTEKLRPEMEGPGSFTIFAPSNEAWASLPAEVLDSLVSNVNIELLNALRYHMVGRRVLTDELKHGMTLTSMYQNSNIQIHHYPNGIVTVNCARLLKADHHATNGVVHLIDKVISTITNNIQQIIEIEDTFETLRAAVAASGLNTMLEGNGQYTLLAPTNEAFEKIPSETLNRILGDPEALRDLLNNHILKSAMCAEAIVAGLSVETLEGTTLEVGCSGDMLTINGKAIISNKDILATNGVIHYIDELLIPDSAKTLFELAAESDVSTAIDLFRQAGLGNHLSGSERLTLLAPLNSVFKDGTPPIDAHTRNLLRNHIIKDQLASKYLYHGQTLETLGGKKLRVFVYRNSLCIENSCIAAHDKRGRYGTLFTMDRVLTPPMGTVMDVLKGDNRFSMLVAAIQSAGLTETLNREGVYTVFAPTNEAFRALPPRERSRLLGDAKELANILKYHIGDEILVSGGIGALVRLKSLQGDKLEVSLKNNVVSVNKEPVAEPDIMATNGVVHVITNVLQPPANRPQERGDELADSALEIFKQASAFSRASQRSVRLAPVYQKLLERMKH

SEQ ID NO: 123 - DNA, 1205 bp, Homo sapiens
ccagtcagcagagggacaggaatcattcggccactgttcagacgggagccacacccttctccaatccaagcctggccccagaagatcacaaagagccaaagaaactggcaggtgtccacgcgctccaggccagtgagttggttgtcacttactttttctgtggggaagaaattccataccggaggatgctgaaggctcagagcttgaccctgggccactttaaagagcagctcagcaaaaagggaaattataggtattacttcaaaaaagcaagcgatgagtttgcctgtggagcggtgtttgaggagatctgggaggatgagacggtgctcccgatgtatgaaggccggattctgggcaaagtggagcggatcgattgagccctgcggtctggctttggtgaactgttggagcccgaagctcttgtgaactgtcttggctgtgagcaactgcgacaaaacattttgaaggaaaattaaaccaatgaagaagacaaagtctaaggaagaatcggccagtgggccttcgggagggcggggggaggttgattttcatgattcatgagctgggtactgactgagataagaaaagcctgaactatttattaaaaacatgaccactcttggctattgaagatgctgcctgtatttgagagactgccatacataatatatgacttcctagggatctgaaatccataaactaagagaaactgtgtatagcttacctgaacaggaatccttactgatatttatagaacagttgatttcccccatccccagtttatggatatgctgctttaaacttggaagggggagacaggaagttttaattgttctgactaaacttaggagttgagctaggagtgcgttcatggtttcttcactaacagaggaattatgctttgcactacgtccctccaagtgaagacagactgttttagacagactttttaaaatggtgccctaccattgacacatgcagaaattggtgcgttttgtttttttttcctatgctgctctgttttgtcttaaaggtcttgaggattgaccatgttgcgtcatcatcaacattttgggggttgtgttggatgggatgatctgttgcagagggagaggcagggaaccctgctccttcgggccccaggttgatcctgtgactgaggctccccctcatgtagcctccccaggcccagggccctgagg

SEQ ID NO: 124 - DNA, 583 bp, Homo sapiens
ccaagaagcagtggccttattgcatcccaaaccacgcctcttgaccaggctgcctcccttgtggcagcaacggcacagctaattctactcacagtgcttttaagtgaaaatggtcgagaaagaggcaccaggaagccgtcctggcgcctggcagtccgtgggacgggatggttctggctgtttgagattctcaaaggagcgagcatgtcgtggacacacacagactatttttagattttcttttgccttttgcaaccaggaacagcaaatgcaaaaactctttgagagggtaggagggtgggaaggaaacaaccatgtcatttcagaagttagtttgtatatattattataatcttataattgttctcagaatcccttaacagttgtatttaacagaaattgtatattgtaatttaaaataattatataactgtatttgaaataagaattcagacatctgaggttttatttcatttttcaatagcacatatggaattttgcaaagatttaatctgccaagggccgactaagagaagttgtaaagtatgtattatttacatttaatagacttacagggataagg

SEQ ID NO: 125 - DNA, 783 bp, Homo sapiens
tcaaccatacatactgcttccactagctaataccaaatgcaggttctcagatccagacaaatggaggaaaagaacatttatgcttccgtttcagaaagccaagtcgtagttttggcccttcctttctctaaagtttattcccaaaaacaggtagcattcctgattgggcagagaagaggatattttcagcccacatctgctgcaggtatgtcattttctcccatcttcactgtgactagtaaagatctcaccacttctctttggaatttccaactttgcttgtgattgaatgtcacttcgtgaatttgtattatgtcagatcacttggcattgctcttccatatgcatcaagttgccaggcactgttgcgctgtcgggcccactggaatccacgggggtgaaacaaattcaattatgcttttacagatcctgctcaaaaaaggtttcaactgcttaaccaagtacagctcattcttccaccttcttactctgcaaccaaaccaagtgccccatactacaggtaggtgccgagaaattccgcagcagaaaatccaaaatcatttctgaaacctccttgctaacaaaagttctttttttctccaaacagcatataaaatgatcaagtcttgaaagagaaaagaagcaaagtagcaaatacatcaacaattcactatcagaaacacataaaatcccagagagagagaaggcagtatctctgaatcatggatggacttggaaagttcggaaggattccgagtgcttcctttcagaaagacaattctg

SEQ ID NO: 126 - DNA, 604 bp, Homo sapiens
cctgctagaatcactgccgctgtgctttcgtggaaatgacagttccttgttttttttgtttctgtttttgttttacattagtcattggaccacagccattcaggaactaccccctgccccacaaagaaatgaacagttgtagggagacccagcagcacctttcctccacacaccttcattttgaagttcgggtttttgtgttaaagttaatctgtacattctgtttgccattgttacttgtactatacatctgtatatagtgtacggcaaaagagtattaatccactatctctagtgcttgactttaaatcagtacagtacctgtacctgcacggtcacccgctccgtgtgtcgccctatattgagggctcaagctttcccttgttttttgaaaggggtttatgtataaatatattttatgcctttttattacaagtcttgtactcaatgacttttgtcatgacattttgttctacttatactgtaaattatgcattataaagagttcatttaaggaaaattacttggtacaataattattgtaattaavagatgtagcctttattaaaattttatatttttcaaaaaaaaaaaaaaaaaaaaa

SEQ ID NO: 127 - DNA, 417 bp, Homo sapiens
ctgagcctctgtcaccagagaaggctgaggccccaatggcacacctcagaaacctacaccccgaggctggacggctggactcctgagcacaagctccctctcgcaccctttgccagacagtttgtctccaatttcaaactgacctaaggctcttactcctggattttttgtttttaaaccttctcccagccagtcttcgggagggcatgattagagaagtgctcctttgctgatggaggaggggacctaaggaagaaggtggatcccaggtgcctcctctctaattgatcctccccacctagtttcctttgcctctcttccttctaccaggtcatgttttttactctctgccccttctgcctcctagcatttcaaaaactgtagagtgcaccccatagtggacatttttagtccagg

SEQ ID NO: 128 - DNA, 657 bp, Homo sapiens
ccacactgaaatgcagtttaatgtggaaacttttctaaatacatattgtagcatctttggacatcaacgtgtggcctgaaatttttattattgttccctcttctcctccattaaaaaaaaaatctccttgtggtatttagtcatttaccattaacacatattatggcttaaaaagggccatcccttccttttctgagctggagttcttcacgctcacctttgatgcatggccttagctggttactttgccttggtttggtcatgaacattggggttagtggcctggcaacttgaatgcatatggaaagaacaatgccaagtgatctgacataatacaaattccgaagtgacattcaatcacaagcaaagttggaaattccaaagagaagtggtgagatctttactagtcacagtgaagatgggagaaaatgacatacctgcagcagatgtgggctgaaaatatcctcttctctgcccaatcaggaatgctacctgtttttgggaataaactttagagaaaggaagggccaaaactacgacttggctttctgaaacggaagcataaatgttcttttcctccatttgtctggatctgagaacctgcatttggtattagctagtggaagcagtatgtatggttgaagtgcattgctgcag

SEQ ID NO: 129 - DNA, 1220 bp, Homo sapiens
cgcgtgctcggctcacaccaacaaggcaagccaaaggcgcccctccccagagggatccctaacgtgcccagcatgtagattctggactaacagacaacatacattcaccgctggtcacccagatcctcattcaaacccactgctggcacatccctttccttactttgccctgtgctaccagccacggaaggagcctctcttgttttttctataaaatgggtaggcaggagaaaagcaggtgccctaagattgctctaaggcccagcatgtggttacagttctctgacttgcagaacctgccaggtgtatggctacaagttatcctcgtgctgatctgtctcattactaagttaatggagaagacagaaaggtaaaaatcacgtgtagcaagaacaactcttatttcacaaactcaggtatgaaacgaaacgcctgtccttcatggaactgcttttagctcctgtcttttcaaaatggcagagggagttcctacacacactttttccctggaggccaaggtctaggggtagaaaggggaggggtggggctaccaggtagcagttgacaacccaaggtcagaggagtggccctcagtgtcatctgtccacagtgatacctgccaagatgaccactgacccacatctggtcttagtcattggtctcctcagatttctggggccacctgcaagccccattccattcctacagatctctcagccacctgtaagtcctttgtgaagatgtgggtgacacagggggacaggaaaacccatttctcaacccagatccatgtctccactgcttctactctgggttgggattcaggaagacaggcacagtcctctctgttcatagaaacacctgccagtgtcaaggattccagtcaggtgtctatcccaactggtcagggagagaagggcagacccattctcaaagaccaccatgtccaaggtctgacagctccccactggctgcccccacaggggctttaggctggtctgggtcatggggaagcgtccctcttatcgctggtctgtgttctcctggatttggtatctatgttggtacgactcctggccttttatctaaaggactttggcttttgtaaatcacaagccaataatagacttttttctccccctctgttttttgctgtgtcatctctgccttgagactgccttgagacagtgcttgccttgagagagtgagccaattaacag

SEQ ID NO: 130 - DNA, 1274 bp, Homo sapiens
ccatatgagtttgccatctccatggatgccatttcaatgccttcagggtaatcattctctccccaaagactgcccacggggtcatcactcctgtgacgaaatgagggctggattgaagatgttctgctgagcacccccctggtcatctttggggtctcagaagagccataatcatgaccattctcagcatctgaataatcaggttctctccaagtgcttggcaagttctgattgtcctcagcactgggatagtctggctccccaaaaaagggtggagagttaggttgaatgtcagcgcctggataatcaggctttcccagagagtctgcgtatggattgattctaaaacttgtatgttccagattctttctggatcctggatggttcaaattggctctgggtccaggatgatcagagttgctctgagctccagggtagtccggttctaaggagccaaaatgatctggatgtgttctggagcctgcatagtttccactgctgctggagcctgcaaaatcaggatttcgttgagatccagggtagtctggttgtctggatgatgctcggtggtagggatgactctgaaattcactataatctggctctggtagagaggtaggatggtctgggcttgttctagaggctgcagagtatgcattgcttctggtgccagaatagtctggattactcagagatctaggataatttggttctgccagagacccaggatagtctggacgtgttctggaggctacagagtatggattgctcctggtgccggggtaatctggattgttcagaggacctggaacatctggataaccttgagttttcaaatacccctgcgtacggttctgagaccctgaatagtcagggtaatctgggtcttcctcagaccagttattcctgtagtaggcagacatgttggtatggactcttcaccctggagtggtaaactgtcccagcatttgcaattactcagggatcttttttttttcacttttttgcccttattgttcttgctttgtcccaagtagatgcaaatgttgtgcaaaccaacttgatcttaagatgttgttaagaacactggagtcacgtgtccatgggtccttcaggctggcttttgatgggagctgggatgcagatgatttacggagggttataatctgtgatgctggtctgaagtctgaatattccaagttgctgactgcaggcagagcctcatgtcctcctggcgctcctgttgccgctgcttgcgctggccctcgggtcga

SEQ ID NO: 131 - DNA, 554 bp, Homo sapiens
  misc_feature 403: n = A,T,C or G
ctgtaattctgccttttctaccttcattccatccttcctctgcccagataaagkccagcagaaattcctcctttctacctctctgggactctgagacaggaaatcttcaaggaggagtttttccctccccactattcttattctcaacccccagaggaaccaaggctgctgtacccacctcagggacagaactccacactatagtgggaaagcttcagggacccctccttttagtgctcagggctcacctatgctactggtccttttggcaaaaaaggaaaatgatagagccagggttgcccctgatgtagcagccttactgtggaggggccaaagctggtgttcagagctcacccaaggagggaggtgataaggtgtcatgcgttctgctgaacccactggntggtatgaacatgaggcttggggtgagggaaaccaagtaggggttggagaaggagcagcacctttgtmacacctggctacccatagctagctttctgccctcaaaaactcagccttcaagggatccagcccacacacgccacaggcagcag

SEQ ID NO: 132 - DNA, 787 bp, Homo sapiens
ctggtcacccaactcttgtggaagaggggaattgagatcgagtactgaatatctggcagagaggctggaatccttcagccccagagcccagggaccactccagtagatgcagagaggggcctgcccaggggtcagggcagtgggtatcactggtgacatcaagaatatcagggctggggaggcatctttgtttcctggtgccctcctcaaagttgctgacactttggggacgggaaggggtagaagtagggctgctccttttggagctggagggaatagacctggagacagagttgaggcagtcgggctgtccaggttctaagcatcacagcttctgcactgggctctgaggagattctcagccagaggatcccagcctcctcctccctcaaatgtcagtccaagcaaataccaaagcaacgcatcgattttgtggaagtcaattagagatgtggggagctatcggagacaagcactattgtaccttttcacctccacacttgtcacaagcagggactgtctcctccccactttgcttgccacgcctgccatggcttgagctggggtgaggagtggtctttatcttctttgggagatcctgactggttgcgcacttgctaagggcaggaagtctggagggctgcaggaatggtgccgttgataaacaggtggacttataatcatcatgcactgcaattgtagaacatagtctcctgccttttctcatttgtataattgtctgggtcaatattctcccaatattgggaggggctctgcagccctccag

SEQ ID NO: 133 - DNA, 219 bp, Homo sapiens
  misc_feature 19, 191: n = A,T,C or G
tactgctctaagttttgtnaaatttttcatattttaatttcaagcttattttggagagataggaaggtcatttccatgtatgcataataatcctgcaaagtacaggtactttgtctaagaaacattggaagcaggttaaatgttttgtaaactttgaaatatatggtctaatgtttaagcagaattggaanagactaatatcggttaacaaataacaac

SEQ ID NO: 134 - DNA, 234 bp, Homo sapiens
gattttaaaaacatcatgactttgaactgaaaaacatacacgtttagcacacaaatattgtaatatgaatgaactccaactccatttgaaaacatgtgaatcaaagtacagttttagaagttagtaattcacatttaagcaagttagcgccttgctgaatacagcctttgtaaaaaagagacttagtgcatattttaatggtacattgtggttttgtaccatttggttgagttg

SEQ ID NO: 135 - DNA, 414 bp, Homo sapiens
ctccagcctggctatatccggtcccgctataacctgggcatcagctgcatcaacctcggggctcaccgggaggctgtggagcactttctggaggccctgaacatgcagaggaaaagccggggcccccggggtgaaggaggtgccatgtcggagaacatctggagcaccctgcgtttggcattgtctatgttaggccagagcgatgcctatggggcagccgacgcgcgggatctgtccaccctcctaactatgtttggcctgccccagtgacagtgggacgggctgccctgtgagtgtccacctggggattaaatatgtcttcaacaagggaggcctggcttctacaatggtttaggtaaaggggcctttgaagtagttctggccaggcttgcaatacacacaacacaagagcca

SEQ ID NO: 136 - DNA, 461 bp, Homo sapiens
gaagtgattaataggtttatttgcatatacacagagaagagtcagcattgttgggtgagaagaggcaggctgtgaggaggtaaggcttcagcagaggaaggcaccttgacagacaacacgagactcctattaaatcagcacagttgcaaacttcacctgcctcaagccaacagctcattgaactcatatgtcgattgagaatcatttacaaaaccaggagagaaacaatgggaagagcaacggtctctcatccctggacctgacactcaaaacattatgtacaggatgcaggaacaaaatctgtctgatcagtgccctctcctgctgggaaaaacacccatcacggaagaatttggggattaaatatgtcttcaacaagggaggcctggcttctacaatggtttaggtaaaggggcctttgaagtagttctggccaggcttgcaatacacacaacacaaga

SEQ ID NO: 137 - DNA, 269 bp, Homo sapiens
atagcaaatggacacaaattacaaatgtgtgtgcgtgggacgaagacatctttgaaggtcatgagtttgttagtttaacatcatatatttgtaatagtgaaacctgtactcaaaatataagcagcttgaaactggctttaccaatcttgaaatttgaccacaagtgtcttatatatgcagatctaatgtaaaatccagaacttggactccatcgttaaaattatttatgtgtaacattcaaatgtgtgcattaaatatgcttccacagt

SEQ ID NO: 138 - DNA, 452 bp, Homo sapiens
  misc_feature 414: n = A,T,C or G
ctccatgggaggcaaaatatagagaatttatggtgcccaactcttatgtaatcactggactaatcttccctggtaactatgcaacatttggacagaaaggcacacaaaaaagtttaaatatttcatgtgccaatctggaaaaaaataatttaaatcaacagaacagacagtacatctacacaaatgaggaaagcagaaaagatacctcacattcatttatctcaggtttcaaagtggcttcaatgctaaagtaaatgtattaacatttggaaaatacaagacaatttttttgtttgttttcaatttttttagctctatacaatgattacaacataagacaaaaaaaaaaaaaaaacacaaaaaacaaaacaaaaaaggagttcaggacttgttatcagtgtccaagtggctaanaactggttcccataacaagcattgaaagttaaggcccc

SEQ ID NO: 139 - DNA, 474 bp, Homo sapiens
tgtgcctcattgaggttacaattgaaacagatgtgagcacctgagagactttccctgattatattcctccacaaaccactgtaccatattaccttattttatcttcttgaaattcttattcattggcttgtttgttgtctctttgcattagatatatgtaagctccttggcataaatttgacattggtaggggactgacattctaacctggcccaggccctaggagagagataactccacaaagcagcacatactatcttaggttagcagggagctaactcaccatgtagcagatgaaaaaaaccaaacccagcactgtgcataaataccacttgccaagaagtcaggtcctcggcaaccgagaatcaacctcagcacaaacgcaggtggctgggctctgttcccccttagccaccacctcagcctctcccctcccctgccccaagtgcccaagagcttggctctctgtgcttt

SEQ ID NO: 140 - DNA, 487 bp, Homo sapiens
cttccctgcctcgtgttcctgagaaacggattaatagccctttatccccctgcaccctcctgcaggggatggcactttgagccctctggagccctccccttgctgagccttactctcttcagactttctgaatgtacagtgccgttggttgggatttggggactggaagggaccaaggacactgaccccaagctgtcctgcctagcgtccagcgtcttctaggagggtggggtctgcctgtcctggtgtggttggtttggccctgtttgctgtgactacccccccccctccccgaaccgagggacggctgcctttgtctctgcctcagatgccacctgccccgcccatgctccccatcagcagcatccagactttcaggaagggcagggccagccagtccagaaccgcatccctcagcagggactgataagccatctctcggagggccccctaatacccaagtggagtctggttcacaccctggggg

SEQ ID NO: 141 - DNA, 248 bp, Homo sapiens
  misc_feature 25: n = A,T,C or G
ttaaagatggggaaatgaggcctgnaaatagaaaagatttgcctagagtcacacacactgtcaggtcaggtagagtcaaaatcaggcaccccgactcacagactgcttcacattgccatcagagattgtcctgcaacaatattatgtttagttctactgcagaatgataactggatcttaccccctttgcctgatctggccacaaacttgtttttcaggtctttccattaggctctcttcagctaatt

SEQ ID NO: 142 - DNA, 173 bp, Homo sapiens
tactaagattgtccaagcctccctcttaaaactttctttccctttagaggaatcattacttcgtattaaaagtttctacttccttgtagaatatctacatccaatgggccatggcacaaaatttaagtctagaaagaatcttaaaggctcatcttatagtaaccagaggcagg

SEQ ID NO: 143 - DNA, 511 bp, Homo sapiens
  misc_feature 26: n = A,T,C or G
cctcgtcagaggggtggttcctggtnacctgtactccacggacctcggtgaagcaaaagcttcagggcagagggaatgaggcaacccagtggcagccccgctgggccccgtggctcctgctctcctattggacgtagaggcaggggagagacttctctatacaaatattctcatcacagaagggatgatccttgctgctctgccgtagggtttttgatgctgagctatgctgcacatgacgttaacctaaagaacttggactgagcttttaaaaaaggacagcaaacaattttataatccttaaagtgtaatagacggttacactagtgcagggtattggggaggctctttgggtgtggaggctgtcacttgtatttattgtgactctaaatctttgatagtaaaacaaatgtaaaaagaaatgtttgccaccagatgggaatagaagttccaataagcaggctggaatgggtggctatacgttgtatcacgaggaagttttagactctga

SEQ ID NO: 144 - DNA, 190 bp, Homo sapiens
cattcttctgtcacatgccaattcagttgtcaatcccattgtctatgcttaccggaaccgagacttccgctacacttttcacaaaattatctccaggtatcttctctgccaagcagatgtcaagagtgggaatggtcaggctggggtacagcctgctctcggtgtgggcctatgatctaggctctcgcct

SEQ ID NO: 145 - DNA, 169 bp, Homo sapiens
gatgtggttatctcctcagatggccagtttgccctctcaggctcctgggatggaaccctgcgcctctgggatctcacaacgggcaccaccacgaggcgatttgtgggccataccaaggatgtgctgagtgtggccttctcctctgacaaccggcagattgtctctggat

SEQ ID NO: 146 - DNA, 511 bp, Homo sapiens
atctagagaagatttgggaaacacatgatagctatggttaaatacttaacagggcaatcacagggaagatgactagatttcctaacatccatgagtgaaatttatagaagtatactctctgacttgatataaaggaagattttaaaaaacatgactgttcaggagtgttcaagtagggtcagatgaccagtgattgggaatacttcgtaagcaggagcaagtaagatctgagccactgttctatcggtagggtgtctgtggtattccttggtcaaagaagtactctaagcaacttcagtctcacgaattactatcaccctcgtgggcatacatgatggttaccctaaagaggaagtttcagaaggcagtaatattggatcctggaatagtcagacaggagccttcatgcagatacccttttcagttctccatacacccattcacaagtggtcacaaaaacacccagtacctttacttggctttacccacttaacaatatgctcaatatgag

SEQ ID NO: 147 - DNA, 421 bp, Homo sapiens
  misc_feature 387: n = A,T,C or G
gaccagttgagttcttcctggctattgtataatccacagccacactgtgaaagcaaatctggccagttagcaacacagggagaatctgcctgaactgaccaaaggtgtccatacttcatgtcagtgagaatttcacctccatcatgttctaaagagccaacaacagattctagggcactgcaaaatgcttcagcaattaattgaagttctgtttgagtacattcatcatctttgagaatgctttctgggtcgttgtgagtcttgtgtctgatatatgcagccaaatgagtttcagtacagccacctcccaacaaagcccatggttccttgagtgttaactgcaggacatgcagtgccgtctgacacgtgagcttcagctcatcccangcagtgtcatttctgttgcagagaagccaagctg

SEQ ID NO: 148 - DNA, 237 bp, Homo sapiens
acacaccactgttggccttccatctgggttaagtcaactgtgagtagaaaccgaagataacagttttgtattcataatggccttttcatactccaagtacttttgagcacagagcctcttgcttctgacctggcacttggaacacagatatatatatcttttgttctgtccctgggaaactgatatttgtgtaagacaaccaccagatattttctctaataaaatcttctaaaatta

SEQ ID NO: 149 - DNA, 168 bp, Homo sapiens
agagaaagttaaagtgcaataatgtttgaagacaataagtggtggtgtatcttgtttctaataagataaacttttttgtctttgctttatcttattagggagttgtatgtcagtgtataaaacatactgtgtggtataacaggcttaataaattctttaaaaggagag

SEQ ID NO: 150 - DNA, 68 bp, Homo sapiens
  misc_feature 22: n = A,T,C or G
ggtggggtttggcagagatgantttaagtgctgtggccagaagcggggggggggtttggtggaaattt

SEQ ID NO: 151 - DNA, 421 bp, Homo sapiens
aggtgacacgtattcgggatgaaagtataatagtcattccttcaacccttgcatttatggactctggaaatcgaagatccacagtgagtaaagatgttcgtccaaagacaaaaaatagaaacagctcaacaaagcgagagacaaaaaaacaaaatggcactgtggctctgcctttgaagtctgggctccagcagagggctgatcttcccacaggagacgagacggcctatgacactctccagaactgttgtcagtgccgaattttacttcccttgcccattctaaatgagcaccaggagaagtgccagaggttagctcaccaaaagaaactccagtggggctggtgagatggctcagcgggtaagagcacccgactgctcttccgaaggtccggagttcaaatcccagcaaccacatggtg

SEQ ID NO: 152 - DNA, 507 bp, Homo sapiens
  misc_feature 12, 31, 37, 58, 95, 102, 130, 151, 155, 211, 230, 244, 253,274, 288, 318, 322, 343, 355, 376, 395, 446, 449, 453, 470,475, 482, 484, 488, 497: n = A,T,C or G
gaattcggcacnagctcgtgccgccagggtnggtccnttttttgctccgcctcgccangacttcctacagctatcgccagtcgtcggccacgtcntccttcngaggcctgggcggcggctccgtgcgttntgggccgggggtcgcctttcnctcncccagcattcacgggggctccggcggccgcggcgtatccgtgtcctccgcccgctntgtgtcctcgtcctcctcnggggcctacggctngctgctacngcggcttcctgaccgcttccnacgggctgctggcnggcaacgagaagctaaccatgcagaacctnaacnaccgcctggcctcctacctgnacaaggtgcgcnccctgtaggcggccaacggcnagctagaggtgaagatccnctactgggtaccagaagcaggggcctgggccctgcccgactacagccactnctncacnaccatgcagtacctgcnggganaagattntngggngccaccatngagaactgca

SEQ ID NO: 153 - DNA, 513 bp, Homo sapiens
gaattcggcacgaggtggctcagatgtccactactgggagtatggtcgaattgggaattttattgtgaaaaagcccatggtgctgggacatgaagcttcgggaacagtcgaaaaagtgggatcatcggtaaagcacctaaaaccaggtgatcgtgttgccatcgagcctggtgctccccgagaaaatgatgaattctgcaagatgggccgatacaatctgtcaccttccatcttcttctgtgccgcgccccccgatgacgggaacctctgccggttctataagcacaatgcagccttttgttacaagcttcctgacaatgtcacctttgaggaaggcgccctgatcgagccactttctgtggggatccatgcctgcaggagaggcggagttaccctgggacacaaggtccttgtgtgtggagctgggccaatcgggatggtcactttgctcgtggccaaagcaatgggagcagctcaagtagtggtgactgatctgtctgctacccgattgtc

SEQ ID NO: 154 - DNA, 507 bp, Homo sapiens
  misc_feature 26: n = A,T,C or G
ggcacgagctcgtgccgaattcggcncgagcagacacaatggtaagaatggtgcctgtcctgctgtctctgctgctgcttctgggtcctgctgtcccccaggagaaccaagatggtcgttactctctgacctatatctacactgggctgtccaagcatgttgaagacgtccccgcgtttcaggcccttggctcactcaatgacctccagttctttagatacaacagtaaagacaggaagtctcagcccatgggactctggagacaggtggaaggaatggaggattggaagcaggacagccaacttcagaaggccagggaggacatctttatggagaccctgaaagacatcgtggagtattacaacgacagtaacgggtctcacgtattgcagggaaggtttggttgtgagatcgagaataacagaagcagcggagcattctggaaatattactatgatggaaaggactacattgaattcaacaaagaaatcccagcctgggtcccct

SEQ ID NO: 155 - DNA, 507 bp, Homo sapiens
  misc_feature 27: n = A,T,C or G
ggcacgaggagacctaagggctgagtntcgggaacaggagaaagctctgttggccctccagcagcagtgtgctgagcaggcacaggagcatgaggtggagaccagggccctgcaggacagctggctgcaggcccaggcagtgctcaaggaacgggaccaggagctggaagctctgcgggcagaaagtcagtcctcccggcatcaggaggaggctgcccgggcccgggctgaggctctgcaggaggcccttggcaaggctcatgctgccctgcaggggaaagagcagcatctcctcgagcaggcagaattgagccgcagtctggaggccagcactgcaaccctgcaagcctccctggatgcctgccaggcacacagtcggcagctggaggaggctctgaggatacaagaaggtgagatccaggaccaggatctccgataccaggaggatgtgcagcagctgcagcaggcacttgcccagagggatgaagagctgagacatcagcagga

SEQ ID NO: 156 - DNA, 509 bp, Homo sapiens
  misc_feature 26: n = A,T,C or G
ggcacgaggacagagagaaccctgtngaaagagcgttaccaggaggtcctggacaaacagaggcaagtggagaatcagctccaagtgcaattaaagcagcttcagcaaaggagagaagaggaaatgaagaatcaccaggagatattaaaggctattcaggatgtgacaataaagcgggaagaaacaaagaagaagatagagaaagagaagaaggagtttttgcagaaggagcaggatctgaaagctgaaattgagaagctttgtgagaagggcagaagagaggtgtgggaaatggaactggatagactcaagaatcaggatggcgaaataaataggaacattatggaagagactgaacgggcctggaaggcagagatcttatcactagagagccggaaagagttactggtactgaaactagaagaagcagaaaaagaggcagaattgcaccttacttacctcaagtcaactcccccaacactggagacagttcgttccaaacaggagtg

SEQ ID NO: 157 - DNA, 507 bp, Homo sapiens
ggcacgagggcagccctcctaccggcgcacgtggtgccgccgctgctgcctcccgctcgccctgaacccagtgcctgcagccatggctcccggccagctcgccttatttagtgtctctgacaaaaccggccttgtggaatttgcaagaaacctgaccgctcttggtttgaatctggtcgcttccggagggactgcaaaagctctcagggatgctggtctggcagtcagagatgtctctgagttgacgggatttcctgaaatgttggggggacgtgtgaaaactttgcatcctgcagtccatgctggaatcctagctcgtaatattccagaagataatgctgacatggccagacttgatttcaatcttataagagttgttgcctgcaatctctatccctttgtaaagacagtggcttctccaggtgtaagtgttgaggaggctgtggagcaaattgacattggtggagtaaccttactgagagctgcagccaaaaaccacgctcgagt

SEQ ID NO: 158 - DNA, 507 bp, Homo sapiens
  misc_feature 27, 428, 448, 449, 456, 462, 490, 492, 497, 498, 502, 503: n = A,T,C or G
ggcacgagtcgagctgtgcctattcgngtcaatccaagagtgagtaatgtgaagtctgtctacaaaacccacattgatgtcattcattatcggaaaacggatgcaaaacgtctgcatggccttgatgaagaagcagaacagaaacttttttcagagaaacgtgtggaattgcttaaggaactttccaggaaaccagacatttatgagaggcttgcttcagccttggctccaagcatttatgaacatgaagatataaagaagggaattttgcttcagctctttggcgggacaaggaaggattttagtcacactggaaggggcaaatttcgggctgagatcaacatcttgctgtgtggcgaccctggtaccagcaagtcccagctgctgcagtacgtgtacaacctcgtccccaggggccagtacacgtntgggaagggctccagtgcanntggcctnactgcntacgtaatgaaagaccctgagacaaggnanctggnnctgnnacag

SEQ ID NO: 159 - DNA, 508 bp, Homo sapiens
  misc_feature 6, 8, 25, 26: n = A,T,C or G
ggcacnanaaaccaggattatggtnnggatccaaagattgctaatgcaataatgaaggcagcagatgaggtagctgaaggtaaattaaatgatcattttcctctcgtggtatggcagactggatcaggaactcagacaaatatgaatgtaaatgaagtcattagcaatagagcaattgaaatgttaggaggtgaacttggcagcaagatacctgtgcatcccaacgatcatgttaataaaagccagagctcaaatgatacttttcccacagcaatgcacattgctgctgcaatagaagttcatgaagtactgttaccaggactacagaagttacatgatgctcttgatgcaaaatccaaagagtttgcacagatcatcaagattggacgtactcatactcaggatgctgttccacttactcttgggcaggaatttagtggttatgttcaacaagtaaaatatgcaatgacaagaataaaagctgccatgccaagaatctatgagctcg

SEQ ID NO: 160 - DNA, 508 bp, Homo sapiens
  misc_feature 27: n = A,T,C or G
ggcacgagcttggagcaaagtcatctnaaggaattagaggacacacttcaggttaggcacatacaagagtttgagaaggttatgacagaccacagagtttctttggaggaattaaaaaaggaaaaccaacaaataattaatcaaatacaagaatctcatgctgaaattatccaggaaaaagaaaaacagttacaggaattaaaactcaaggtttctgatttgtcagacacgagatgcaagttagaggttgaacttgcgttgaaggaagcagaaactgatgaaataaaaattttgctggaagaaagcagagcccagcagaaggagaccttgaaatctcttcttgaacaagagacagaaaatttgagaacagaaattagtaaactcaaccaaaagattcaggataataatgaaaattatcaggtgggcttagcagagctaagaactttaatgacaattgaaaaagatcagtgtatttccgagttaattagtagacatgaagaagaatcta

SEQ ID NO: 161 - DNA, 507 bp, Homo sapiens
ggcacgagcgctaccggcgcctcctctgcggccactgagccggagccggcctgagcagcgctctcggttgcagtacccactggaaggacttaggcgctcgcgtggacaccgcaagcccctcagtagcctcggcccaagaggcctgctttccactcgctagccccgccgggggtccgtgtcctgtctcggtggccggacccgggcccgagcccgagcagtagccggcgccatgtcggtggtgggcatagacctgggcttccagagctgctacgtcgctgtggcccgcgccggcggcatcgagactatcgctaatgagtatagcgaccgctgcacgccggcttgcatttcttttggtcctaagaatcgttcaattggagcagcagctaaaagccaggtaatttctaatgcaaagaacacagtccaaggatttaaaagattccatggccgagcattctctgatccatttgtggaggcagaaaaatctaaccttgcatatgatattgtgca

SEQ ID NO: 162 - DNA, 507 bp, Homo sapiens
  misc_feature 27: n = A,T,C or G
ggcacgagcagctgtgcaccgacatgntctcagtgtcctgagtaagaccaaagaagctggcaagatcctctctaataatcccagcaagggactggccctgggaattgccaaagcctgggagctctacggctcacccaatgctctggtgctactgattgctcaagagaaggaaagaaacatatttgaccagcgtgccatagagaatgagctactggccaggaacatccatgtgatccgacgaacatttgaagatatctctgaaaaggggtctctggaccaagaccgaaggctgtttgtggatggccaggaaattgctgtggtttacttccgggatggctacatgcctcgtcagtacagtctacagaattgggaagcacgtctactgctggagaggtcacatgctgccaagtgcccagacattgccacccagctggctgggactaagaaggtgcagcaggagctaagcaggccgggcatgctggagatgttgctccctggccagcctga

SEQ ID NO: 163 - DNA, 460 bp, Homo sapiens
ggcacgagaaataactttatttcattgtgggtcgcggttcttgtttgtggatcgctgtgatcgtcacttgacaatgcagatcttcgtgaagactctgactggtaagaccatcaccctcgaggttgagcccagtgacaccatcgagaatgtcaaggcaaagatccaagataaggaaggcatccctcctgaccagcagaggctgatctttgctggaaaacagctggaagatgggcgcaccctgtctgactacaacatccagaaagagtccaccctgcacctggtgctccgtctcagaggtgggatgcaaatcttcgtgaagacactcactggcaagaccatcacccttgaggtggagcccagtgacaccatcgagaacgtcaaagcaaagatccaggacaaggaaggcattcctcctgaccagcagaggttgatctttgccggaaagcagctggaagatggg

SEQ ID NO: 164 - DNA, 462 bp, Homo sapiens
ggcacgagccggatctcattgccacgcgcccccgacgaccgcccgacgtgcattcccgattccttttggttccaagtccaatatggcaactctaaaggatcagctgatttataatcttctaaaggaagaacagaccccccagaataagattacagttgttggggttggtgctgttggcatggcctgtgccatcagtatcttaatgaaggacttggcagatgaacttgctcttgttgatgtcatcgaagacaaattgaagggagagatgatggatctccaacatggcagccttttccttagaacaccaaagattgtctctggcaaagactataatgtaactgcaaactccaagctggtcattatcacggctggggcacgtcagcaagagggagaaagccgtcttaatttggtccagcgtaacgtgaacatctttaaattcatcattcctaatgttgtaaaata

SEQ ID NO: 165 - DNA, 462 bp, Homo sapiens
ggcacgaggaagccatgagcagcaaagtctctcgcgacaccctgtacgaggcggtgcgggaagtcctgcacgggaaccagcgcaagcgccgcaagttcctggagacggtggagttgcagatcagcttgaagaactatgatccccagaaggacaagcgcttctcgggcaccgtcaggcttaagtccactccccgccctaagttctctgtgtgtgtcctgggggaccagcagcactgtgacgaggctaaggccgtggatatcccccacatggacatcgaggcgctgaaaaaactcaacaagaataaaaaactggtcaagaagctggccaagaagtatgatgcgtttttggcctcagagtctctgatcaagcagattccacgaatcctcggcccaggtttaaataaggcaggaaagttcccttccctgctcacacacaacgaaaacatggtggccaaagtggatg

SEQ ID NO: 166 - DNA, 459 bp, Homo sapiens
  misc_feature 19, 27, 40, 42, 43, 46, 63, 65, 70, 85, 87, 94, 102, 103,106, 144, 149, 166, 202, 209, 215, 216, 221, 310, 315, 332,358, 366, 368, 379, 382, 384, 410, 424, 429, 434: n = A,T,C or G
ggcacgagagggacctgtntgaatggntccactagggttnanntgnctcttacttttaaccantnaaatngacctgcccgtgaanangcgggcntgacacannaanacgagaagaccctatggagctttaatttattaatgcanacagnacctaacaaacccacangtcctaaactaccaagcctgcattaaaaatttcggntggggcnacctcnnagcanaacccaacctccgagcaactcatgctaagacttcaccagtcaaagctgaactactatactcaattgatccaataacttgaccaacagancaagntaccctagggataacancacaatcctattctagaccccttatnaccaatangntttacacctcnatngnggaaccaggacatccgatggggcagncgttattaaagttngttgntaacnataaagtctacgtgatctgagttag

SEQ ID NO: 167 - DNA, 464 bp, Homo sapiens
  misc_feature 17, 20, 22, 28, 33, 40, 45, 46, 55, 82, 99, 108, 115, 132,150, 171, 182, 192, 244, 252, 276, 306, 313, 318, 320, 332,352, 370, 376, 377, 378, 393, 395, 399, 403, 420, 434, 435,455, 456: n = A,T,C or G
gaattgggaccaacganaancntgcggntcttnttttgcntccanngcccagctnattgctcagacacacatggggaaggtnaaggtcgggagtcaacngatttggtngtattgnagcgtttggtcaccagngctgcttttaactctggnaaagtggatattgttgtcatnaatgacccctncattgacctnaactacatggtttacatgttccaatatgattccacccatggcaaattccatngcaccgtnaaggctgagaacgggaagcttgtnatcaatggaaatcccatcaccatctttcangaacganatccntncaaaaatcaaanttgggggcgatgcttggccncttgaagtaccgttcaangggaannnccccactttggccgntntttncaancccaccccaatttgggnaaaaaaaaaggggnntttgggggggggccttttanntttttttt

SEQ ID NO: 168 - DNA, 462 bp, Homo sapiens
  misc_feature 10, 11, 12, 18, 42, 47, 83, 84, 88, 91, 100, 123, 172, 174,177, 189, 192, 196, 199, 204, 210, 216, 218, 228, 231, 232,236, 240, 249, 251, 259, 263, 264, 269, 272, 275, 278, 280,287, 292, 294, 305, 310, 328, 329, 335, 345, 349, 357: n = A,T,C or G
  misc_feature 375, 377, 446, 455: n = A,T,C or G
ggcacgaggnnnaacctncggggctggggcagcacgccttgngcaancctgcactgcactgaagacccggtgccggaagccgnnggcngcnacatgcagnaactgaaccagctgggcgcgcancagttctcagacctgacagaggtgcttttacacttcctaactgatccanantangtggaaatattnttngttnatntcatntgaatnatccancnccaatcatancanntttnattncctcataancnttgagaanagcnnccttntgnttncananggtgctntgaanangagtctcacangcaancaggtccaagcggatttnntaactntgggtcttantgangagaaagncacttacttttctgaaancnggaagcagaatgctcccacccttgctcgatgggccatacgtcaagactctgatgattaaccagctttanatatggacnggaaatt

SEQ ID NO: 169 - DNA, 460 bp, Homo sapiens
  misc_feature 20, 64, 69, 71, 73, 91, 109, 113, 151, 237, 238, 241, 255,266, 269, 280, 290, 302, 312, 318, 329, 334, 355, 357, 359,376, 379, 380, 382, 397, 409, 410, 415, 422, 442, 446, 452: n = A,T,C or G
ggcacgagggacagcagacnagacagtcacagcagccttgacaaaacgttcctggaactcaagntcttntncncaaaggaggacagagcanacagcagagaccatggantctncctcggcccctccccacagatggtgcatcccctggcanaggctcctgctcacagcctcacttctaaccttctggaacccgcccaccactgccaagctcactattgaatccacgccgttcaatgnntcntaggggaaggaggngctttctactnttncacaatctganccccttcttntttggttactancatggctctncatgtnaaaatactggnatggntaacctgtcaaatttataggnantntgctaattgggaaactnccnntngtctaccccaggggncccagattcctnngttcncataacnattaatttaacccctaatgncaancccttngttaaaga

SEQ ID NO: 170 - DNA, 508 bp, Homo sapiens
  misc_feature 27: n = A,T,C or G
ggcacgagggggatttttaggtggtcnggtgtggtatcaggaataatgtgggaggccagattgaagtccaggccaggaacaatggtaattgtgggacttaagaaagtgtgagtacagctgaatgagccggggagcagaaagtatatgcgtcaggtatgaggaagaaaatagattttggaagttatgagaaatgtagagagtgagttgagcatagtttgtgattttgagggcctctaacagtattaaagcagcggcagcggctgcacacagacatgatggctaggctaaaacaggaaggtcaagttgtttggacagaaaggctacagggtgcagtcctggctcttgtgtaagaattctgaccacactaaccatgcctaggaaggaaaggagttgttcttttgtaagggattgaggtttgggagattaatcggacacgatcagcagggagagcacctgtgtttttatgagaattatgctgagataggtaacagatgaggatgaaatttgg

SEQ ID NO: 171 - DNA, 507 bp, Homo sapiens
  misc_feature 26: n = A,T,C or G
ggcacgagaccagccactagcgcagnctcgagcgatggcctatgtccccgcaccgggctaccagcccacctacaacccgacgctgccttactaccagcccatcccgggcgggctcaacgtgggaatgtctgtttacatccaaggagtggccagcgagcacatgaagcggttcttcgtgaactttgtggttgggcaggatccgggctcagacgtcgccttccacttcaatccgcggtttgacggctgggacaaggtggtcttcaacacgttgcagggcgggaagtggggcagcgaggagaggaagaggagcatgcccttcaaaaagggtgccgcctttgagctggtcttcatagtcctggctgagcactacaaggtggtggtaaatggaaatcccttctatgagtacgggcaccggcttcccctacagatggtcacccacctgcaagtggatggggatctgcaacttcaatcaatcaacttcatcggaggccagcccctccggcccca

SEQ ID NO: 172 - DNA, 409 bp, Homo sapiens
ggcacgagctggagtgtctgctgccaccccctcgtcctctgcagaaatgtctgtcacctacgatgactctgtgggagtggaagtgtccagcgacagcttctgggaggttgggaactacaaacggactgtgaagcggattgacgatggccaccgcctgtgtggtgacctcatgaactgtctgcatgagcgggcacgcatcgagaaggcgtatgcacagcagctcactgagtgggcccgacgctggaggcagctggtagagaagggaccacagtatgggaccgtggagaaggcctggatagctgtcatgtctgaagcagagagggtgagtgaactgcacctggaagtgaaggcatcactgatgaatgaagactttgagaagatcaagaactggcagaaggaagcctttcac

SEQ ID NO: 173 - DNA, 409 bp, Homo sapiens
ggcacgagggcagctagaggaagagtccaaggccaagaacgcactggcccacgccctgcagtcagctcgccatgactgtgacctgctgcgggaacagtatgaagaggagcaggaagccaaggctgagctgcagagggccatgtccaaggccaacagcgaggtagcccagtggaggacgaaatatgagacggatgccatccagcgcacagaggagctggaagaggccaagaagaagctggctcagcgtctgcaggatgctgaggaacatgtagaagctgtgaattccaaatgcgcttctcttgaaaagacgaagcagcgacttcagaatgaagtggaggacctcatgattgacgtggagaggtctaatgctgcctgcgctgcgcttgataagaagcagaggaactttgac

SEQ ID NO: 174 - DNA, 407 bp, Homo sapiens
ggcacgagccggggcggggcgcggcgctccggctcgaggcattcggagctgcgggagccgggctggcaggagcaggatggcggcggcggcggctgcaggcgaggcgcgccgggtgctggtgtacggcggcaggggcgctctgggttctcgatgcgtgcaggcttttcgggcccgcaactggtgggttgccagcgttgatgtggtggagaatgaagaggccagcgctagcatcattgttaaaatgacagactcgttcactgagcaggctgaccaggtgactgctgaggttggaaagctcttgggtgaagagaaggtggatgcaattctttgcgttgctggaggatgggccgggggcaatgccaaatccaagtctctctttaagaactgtgacctgatgtggaagcaga

SEQ ID NO: 175 - DNA, 407 bp, Homo sapiens
ggcacgagcttgcccgtcggtcgctagctcgctcggtgcgcgtcgtcccgctccatggcgctcttcgtgcggctgctggctctcgccctggctctggccctgggccccgccgcgaccctggcgggtcccgccaagtcgccctaccagctggtgctgcagcacagcaggctccggggccgccagcacggccccaacgtgtgtgctgtgcagaaggttattggcactaataggaagtacttcaccaactgcaagcagtggtaccaaaggaaaatctgtggcaaatcaacagtcatcagctacgagtgctgtcctggatatgaaaaggtccctggggagaagggctgtccagcagccctaccactctcaaacctttacgagaccctgggagtcgttggatccaccaccac

SEQ ID NO: 176 - DNA, 409 bp, Homo sapiens
ggcacgagtggtgccaaaacgggaccatgccctcctggaggagcagagcaagcagcagtccaacgagcacctgcgccgccagttcgccagccaggccaatgttgtggggccctggatccagaccaagatggaggagatcgggcgcatctccattgagatgaacgggaccctggaggaccagctgagccacctgaagcagtatgaacgcagcatcgtggactacaagcccaacctggacctgctggagcagcagcaccagctcatccaggaggccctcatcttcgacaacaagcacaccaactataccatggagcacatccgcgtgggctgggagcagctgctcaccaccattgcccgcaccatcaacgaggtggagaaccagatcctcacccgcgacgccaagggcatc

SEQ ID NO: 177 - DNA, 408 bp, Homo sapiens
ggcacgaggtccaggtaactgcaaaaacaatggctcagcatgaagaactgatgaagaaaactgaaacaatgaatgtagttatggagaccaataaaatgctaagagaagagaaggagcaggtttcaaaaatggcatcagtccgtcagcatttggaagaaacaacacagaaagcagaatcacagttgttggagtgtaaagcatcttgggaggaaagagagagaatgttaaaggatgaagtttccaaatgtgtatgtcgctgtgaagatctggagaaacaaaacagattacttcatgatcagatcgaaaaattaagtgacaaggtcgttgcctctgtgaaggaaggtgtacaaggtccactgaatgtatctctcagtgaagaaggaaaatctcaagaacaaattttggaaa

SEQ ID NO: 178 - DNA, 92 bp, Homo sapiens
ggcacgagaagaaattaagagctaaagacaaggagaatgaaaatatggttgcaaagctgaacaaaaaagttaaagagctagaagaggagatg

SEQ ID NO: 179 - DNA, 411 bp, Homo sapiens
ggcacgaggagacacgccacctataccacagttctcagaatgaattagctaagttggaatcagaacttaagagtctcaaagaccagttgactgatttaagtaactctttagaaaaatgtaaggaacaaaaaggaaacttggaagggatcataaggcagcaagaggctgatattcaaaattctaagttcagttatgaacaactggagactgatcttcaggcctccagagaactgaccagtaggctgcatgaagaaataaatatgaaagagcaaaagattataagcctgctttctggcaaggaagaggcaatccaagtagctattgctgaactgcgtcagcaacatgataaagaaattaaagagctggaaaacctgctgtcccaggaggaagaggagaatattgttttagaag

SEQ ID NO: 180 - DNA, 411 bp, Homo sapiens
ggcacgaggttgttcggagcgggcgagcggagttagcagggctttactgcagagcgcgccgggcactccagcgaccgtggggatcagcgtaggtgagctgtggccttttgcgaggtgctgcagccatagctacgtgcgttcgctacgaggattgagcgtctccacccatcttctgtgcttcaccatctacataatgaatcccagtatgaagcagaaacaagaagaaatcaaagagaatataaagactagttctgtcccaagaagaactctgaagatgattcagccttctgcatctggatctcttgttggaagagaaaatgagctgtccgcaggcttgtccaaaaggaaacatcggaatgaccacttaacatctacaacttccagccctggggttattgtcccagaatctag

SEQ ID NO: 181 - DNA, 411 bp, Homo sapiens
ggcacgaggcgggacagggcgaagcggcctgcgcccacggagcgcgcgacactgcccggaagggaccgccacccttgccccctcagctgcccactcgtgatttccagcggcctccgcgcgcgcacgatgccctcggccaccagccacagcgggagcggcagcaagtcgtccggaccgccaccgccgtcgggttcctccgggagtgaggcggccgcgggagccggggccgccgcgccggcttctcagcaccccgcaaccggcaccggcgctgtccagaccgaggccatgaagcagattctcggggtgatcgacaagaaacttcggaacctggagaagaaaaagggtaagcttgatgattaccaggaacgaatgaacaaaggggaaaggcttaatcaagatcagctggatgcc

SEQ ID NO: 182 - DNA, 411 bp, Homo sapiens
ggcacgagccgacatggagctgttcctcgcgggccgccgggtgctggtcaccggggcaggcaaaggtatagggcgcggcacggtccaggcgctgcacgcgacgggcgcgcgggtggtggctgtgagccggactcaggcggatcttgacagccttgtccgcgagtgcccggggatagaacccgtgtgcgtggacctgggtgactgggaggccaccgagcgggcgctgggcagcgtgggccccgtggacctgctggtgaacaacgccgctgtcgccctgctgcagcccttcctggaggtcaccaaggaggcctttgacagatcctttgaggtgaacctgcgtgcggtcatccaggtgtcgcagattgtggccaggggcttaatagcccggggagtcccaggggccatcgtgaa

SEQ ID NO: 183 - DNA, 409 bp, Homo sapiens
ggcacgagcctacactctggccagagataccacagtcaaacctggagccaaaaaggacacaaaggactctcgacccaaactgccccagaccctctccagaggttggggtgaccaactcatctggactcagacatatgaagaagctctatataaatccaagacaagcaacaaacccttgatgattattcatcacttggatgagtgcccacacagtcaagctttaaagaaagtgtttgctgaaaataaagaaatccagaaattggcagagcagtttgtcctcctcaatctggtttatgaaacaactgacaaacacctttctcctgatggccagtatgtccccaggattatgtttgttgacccatctctgacagttagagccgatatcactggaagatattcaaatcgtctc

SEQ ID NO: 184 - DNA, 410 bp, Homo sapiens
ggcacgaggtcattccagcaccaacaggatccaagccagattgattgggctgcattggcccaagcttggattgcccaaagagaagcttcaggacagcaaagcatggtagaacaaccaccaggaatgatgccaaatggacaagatatgtctacaatggaatctggtccaaacaatcatgggaatttccaaggggattcaaacttcaacagaatgtggcaaccagaatggggaatgcatcagcaacccccacacccccctccagatcagccatggatgccaccaacaccaggcccaatggacattgttcctccttctgaagacagcaacagtcaggacagtggggaatttgcccctgacaacaggcatatatttaaccagaacaatcacaactttggtggaccacccgataa

SEQ ID NO: 185 - DNA, 411 bp, Homo sapiens
  misc_feature 366: n = A,T,C or G
ggcacgagcacagatgtagttttctctgcgcgtgtgcgttttccctcctcccccgccctcagggtccacggccaccatggcgtattaggggcagcagtgcctgcggcagcattggcctttgcagcggcggcagcagcaccaggctctgcagcggcaacccccagcggcttaagccatggcgcttctcacggcattcagcagcagcgttgctgtaaccgacaaagacaccttcgaattaagcacattcctcgattccagcaaagcaccgcaacatgaccgaaatgagcttcctgagcagcgaggtgttggtgggggacttgatgtcccccttcgacccgtcgggtttgggggctgaagaaagcctangtctcttagatgattacctggaggtggccaagcacttcaaacctc

SEQ ID NO: 186 - DNA, 410 bp, Homo sapiens
ggcacgagcttctagtcccgccatggccgctctcacccgggacccccagttccagaagctgcagcaatggtaccgcgagcaccgctccgagctgaacctgcgccgcctcttcgatgccaacaaggaccgcttcaaccacttcagcttgaccctcaacaccaaccatgggcatatcctggtggattactccaagaacctggtgacggaggacgtgatgcggatgctggtggacttggccaagtccaggggcgtggaggccgcccgggagcggatgttcaatggtgagaagatcaactacaccgagggtcgagccgtgctgcacgtggctctgcggaaccggtcaaacacacccatcctggtagacggcaaggatgtgatgccagaggtcaacaaggttctggacaagatga

SEQ ID NO: 187 - DNA, 506 bp, Homo sapiens
ctttcgtggctcactccctttcctctgctgccgctcggtcacgcttgtgcccgaaggaggaaacagtgacagacctggagactgcagttctctatccttcacacagctctttcaccatgcctggatcacttcctttgaatgcagaagcttgctggccaaaagatgtgggaattgttgcccttgagatctattttccttctcaatatgttgatcaagcagagttggaaaaatatgatggtgtagatgctggaaagtataccattggcttgggccaggccaagatgggcttctgcacagatagagaagatattaactctctttgcatgactgtggttcagaatcttatggagagaaataacctttcctatgattgcattgggcggctggaagttggaacagagacaatcatcgacaaatcaaagtctgtgaagactaatttgatgcagctgtttgaagagtctgggaatacagatatagaaggaatcgacacaactaatgcatgctat

SEQ ID NO: 188 - DNA, 506 bp, Homo sapiens
gccacagaggcggcggagagatggccttcagcggttcccaggctccctacctgagtccagctgtccccttttctgggactattcaaggaggtctccaggacggacttcagatcactgtcaatgggaccgttctcagctccagtggaaccaggtttgctgtgaactttcagactggcttcagtggaaatgacattgccttccacttcaaccctcggtttgaagatggagggtacgtggtgtgcaacacgaggcagaacggaagctgggggcccgaggagaggaagacacacatgcctttccagaaggggatgccctttgacctctgcttcctggtgcagagctcagatttcaaggtgatggtgaacgggatcctcttcgtgcagtacttccaccgcgtgcccttccaccgtgtggacaccatctccgtcaatggctctgtgcagctgtcctacatcagcttccagcctcccggcgtgtggcctgccaacccggctcccattacccag

SEQ ID NO: 189 - DNA, 399 bp, Homo sapiens
ctggacaggagaagagcctggctgctgaaggcagggctgacacgaccacgggcagcattgctggagccccagaggatgaaagatcgcagagcacagccccccaggcaccagagtgcttcgaccctgccggaccggctgggctcgtgaggccgacatctggcctttcccagggcccaggaaaggaaaccttggaaagtgctctaatcgctctagactctgaaaaacccaagaaacttcgcttccacccaaagcagctgtacttctctgccaggcagggtgagctgcagaaggtgcttctcatgctggttgatggaattgatcccaacttcaaaatggagcaccaaagtaagcgttccccattacatgctgctgcggaggctggccacgtggacatctgcc

SEQ ID NO: 190 - DNA, 401 bp, Homo sapiens
cggcgacggtggtggtgactgagcggagcccggtgacaggatgttggtgttggtattaggagatctgcacatcccacaccggtgcaacagtttgccagctaaattcaaaaaactcctggtgccaggaaaaattcagcacattctctgcacaggaaacctttgcaccaaagagagttatgactatctcaagactctggctggtgatgttcatattgtgagaggagacttcgatgagaatctgaattatccagaacagaaagttgtgactgttggacagttcaaaattggtctgatccatggacatcaagttattccatggggagatatggccagcttagccctgttgcagaggcaatttgatgtggacattcttatctcgggacacacacacaaatttgaag

SEQ ID NO: 191 - DNA, 406 bp, Homo sapiens
tggcagcctaagccgtgggagggttccagtcgagaatgggaagatgaaagacttcagatggaacagaaataaatgccttttttgacaaacgcagcagtgcgtgcctctagcttgcaagagcgttactccccttcatagctttaaaaggttttcgcactgcgtgcagttagagtagctaaatcttgtgtgacgctccacaaacacttgtaagaattttgcagagaaagataaccgttgccacccaatgccccccacaggcattctactccccagtacctcttagggtgggagaaatggtgaagagttgttcctacaacttgctaacctagtggacagggtagtagattagcatcatccggatagatgtgaagaggacggctgtttggataataattaaggataaaat

SEQ ID NO: 192 - DNA, 316 bp, Homo sapiens
cccggggaggccctggtcataaaactttaaattttactagtgttacttaatgtatattctaaaaagagaatgcagtaactaatgccctaaatgtttgatctctgtttgtcattactttttcaaaattatttttttctgtaaagtataatatataaaacttcttgcttaaattgaatttctatattagtggttaattgcagtttattaaagggatcattatcagtaatttcatagcaactgttctagtgttttgtgtttttaaaacagaattaggaatttgagatatctgattatatttttcatatgaatcacagac

SEQ ID NO: 193 - DNA, 146 bp, Homo sapiens
gaaacatggactgccccttaaattttgactgtcctaaaaacctatttctgatttataatatgctgcctgataaagtgacactagatgtaccagctgagtgtttaatcttcccatcacagatcagatttgagcattaacaggtattt

SEQ ID NO: 194 - DNA, 405 bp, Homo sapiens
cggatgtgctcactgacattctactccaagtcggagatgcagatccactccaagtcacacaccgagaccaagccccacaagtgcccacattgctccaagaccttcgccaacagctcctacctggcccagcacatccgtatacactcaggggctaagccctacagttgtaacttctgtgagaaatccttccgccagctctcccaccttcagcagcacacccgaatccacactggtgatagaccatacaaatgtgcacacccaggctgtgagaaagccttcacacaactctccaatctgcagtcccacagacggcaacacaacaaagataaacccttcaagtgccacaactgtcatcgggcgtacacggatgcagcctcactagaggtgcacctgtctacgcacaca

SEQ ID NO: 195 - DNA, 421 bp, Homo sapiens
agaattcggcacgagctactccttgcgcgctggcactccgcagcctttaaggttcgcgcgggggccaggcaagagttagccatgaagagcctcaagtcccgcctgaggaggcaggacgtgcccggccccgcgtcgtctggcgccgccgccgccagcgcgcatgcagcagattggaataaatatgatgaccgattgatgaaagcagcagaaaggggggatgtagaaaaagtgacgtcaatccttgctaaaaagggggtcaatccaggcaaactagatgtggaaggcagatctgtcttccatgttgtgacctcaaaggggaatcttgagtgtttgaatgccatccttatacatggagttgatattacaaccagtgacactgcagggagaaatgctcttcacctggctgctaagtatggacatg

SEQ ID NO: 196 - DNA, 476 bp, Homo sapiens
agaattgatctatagatttaatgcaatgcctactaaaatcccagtacgattttttacaggcatagacaatagacatagccaaaacttattctaaaatacatatgaagatgcacaggccctagttatacaatcttgacaaagaagaataaagtgggaagaatctatttgattttaaggcttaccatgtaactacagtcatcaagagagtgtggtatcggcagacggtcagacatacagatcaatggaatgtaacagaggacccagaaataggcccacacagatatgctcaatggatatttgacaagcgtgcaaaacaattcaatggaagaataagctttcaaaaaaatggcgttggagcaaccggacatccataggaaaaaatgaacccatacctaaaccataaaccttatataaaaataaacacaaaatgaatcataggcttaaatgtaagctataaaacttttagagaaaaacac

SEQ ID NO: 197 - DNA, 503 bp, Homo sapiens
tagccctcggtgaagccccagaccacagctatgagtcccttcgtgtgacgtctgcgcagaaacatgttctgcatgtccagctcaaccggcccaacaagaggaatgccatgaacaaggtcttctggagagagatggtagagtgcttcaacaagatttcgagagacgctgactgtcgggcggtggtgatctctggtgcaggaaaaatgttcactgcaggtattgacctgatggacatggcttcggacatcctgcagcccaaaggagatgatgtggcccggatcagctggtacctccgtgacatcatcactcgataccaggagaccttcaacgtcatcgagaggtgccccaagcccgtgattgctgccgtccatgggggctgcattggcggaggtgtggaccttgtcaccgcctgtgacatccggtactgtgcccaggatgctttcttccaggtgaaggaggtggacgtgggtttggctgcccatgtaggaacactgcagcgcctg

SEQ ID NO: 198 - protein, 168 aa, Homo sapiens
FVAHSLSSAAARSRLCPKEETVTDLETAVLYPSHSSFTMPGSLPLNAEACWPKDVGIVALEIYFPSQYVDQAELEKYDGVDAGKYTIGLGQAKMGFCTDREDINSLCMTVVQNLMERNNLSYDCIGRLEVGTETIIDKSKSVKTNLMQLFEESGNTDIEGIDTTNACY

SEQ ID NO: 199 - protein, 168 aa, Homo sapiens
HRGGGEMAFSGSQAPYLSPAVPFSGTIQGGLQDGLQITVNGTVLSSSGTRFAVNFQTGFSGNDIAFHFNPRFEDGGYVVCNTRQNGSWGPEERKTHMPFQKGMPFDLCFLVQSSDFKVMVNGILFVQYFHRVPFHRVDTISVNGSVQLSYISFQPPGVWPANPAPITQ

SEQ ID NO: 200 - protein, 132 aa, Homo sapiens
GQEKSLAAEGRADTTTGSIAGAPEDERSQSTAPQAPECFDPAGPAGLVRPTSGLSQGPGKETLESALIALDSEKPKKLRFHPKQLYFSARQGELQKVLLMLVDGIDPNFKMEHQSKRSPLHAAAEAGHVDIC

SEQ ID NO: 201 - protein, 120 aa, Homo sapiens
MLVLVLGDLHIPHRCNSLPAKFKKLLVPGKIQHILCTGNLCTKESYDYLKTLAGDVHIVRGDFDENLNYPEQKVVTVGQFKIGLIHGHQVIPWGDMASLALLQRQFDVDILISGHTHKFE

SEQ ID NO: 202 - protein, 135 aa, Homo sapiens
RMCSLTFYSKSEMQIHSKSHTETKPHKCPHCSKTFANSSYLAQHIRIHSGAKPYSCNFCEKSFRQLSHLQQHTRIHTGDRPYKCAHPGCEKAFTQLSNLQSHRRQHNKDKPFKCHNCHRAYTDAASLEVHLSTHT

SEQ ID NO: 203 - protein, 135 aa, Homo sapiens
LLLARWHSAAFKVRAGARQELAMKSLKSRLRRQDVPGPASSGAAAASAHAADWNKYDDRLMKAAERGDVEKVTSILAKKGVNPGKLDVEGRSVFHVVTSKGNLECLNAILIHGVDITTSDTAGRNALHLAAKYGH

SEQ ID NO: 204 - protein, 167 aa, Homo sapiens
ALGEAPDHSYESLRVTSAQKHVLHVQLNRPNKRNAMNKVFWREMVECFNKISRDADCRAVVISGAGKMFTAGIDLMDMASDILQPKGDDVARISWYLRDIITRYQETFNVIERCPKPVIAAVHGGCIGGGVDLVTACDIRYCAQDAFFQVKEVDVGLAAHVGTLQRL

SEQ ID NO: 205 - DNA, 381 bp, Homo sapiens
aaatttgggatcatcgcctgttctgaaaactagatgcaccaaccgtatcattatttgtttgaggaaaaaaagaaatctgcattttaattcatgttggtcaaagtcgaattactatctatttatcttatatcgtagatctgataaccctatctaaaagaaagtcacacgctaaatgtattcttacatagtgcttgtatcgttgcatttgttttaatttgtggaaaagtattgtatctaacttgtattactttggtagtttcatctttatgtattattgatatttgtaattttctcaactataacaatgtagttacgctacaacttgcctaaaacattcaaacttgttttcttttttctgttgttttctttgttaattcattt

SEQ ID NO: 206 - DNA, 514 bp, Homo sapiens
aaaagtaaattgcataaaattacatccaatttctttctctaaaccaacatattcttcaccttcacaaagcaaacacatggtgcactgaaaccgaggtgttaccagctttacatactgttctgccatttgtggggggtgcaaccacaacataagtcagaaaaaaagctatccagcttttcgtggaatctggtgaagtttacacttagcgataagcctctaagcctgaacttagcagggctagcaaaactttatttatttcctaactcctattattttagaatggttttcaaaataatactgcaagttcctaattgaaatacaaaacagaacaaaaagctgtgagaaatctttttttttctttggctccttaaagacttggaataatttatattagtgttgcatacattttaccttctacattttgatgtacttgctcttgaaagcactagaacaaattaattgaaataaaacctctctgaaaccatttgaatctttgatcctaccatagagtttt

SEQ ID NO: 207 - DNA, 522 bp, Homo sapiens
  misc_feature 24: n = A,T,C or G
caagcttttggtgcatagcagccngcctggaagcattctgagtgctctgtctgccctggtgggtttcattatcctgtctgtcaaacaggccaccttaaatcctgcctcactgcagtgtgagttggacaaaaataatataccaacaagaagttatgtttcttacttttatcatgattcactttataccacggactgctatacagccaaagccagtctggctggaactctctctctgatgctgatttgcactctgctggaattctgcctagctgtgctcactgctgtgctgcggtggaaacaggcttactctgacttccctgggagtgtacttttcctgcctcacagttacattggtaattctggcatgtcctcaaaaatgactcatgactgtggatatgaagaactattgacttcttaagaaaaaagggagaaatattaatcagaaagttgattcttatgataatatggaaaagttaaccattatagaaaagcaaagcttgagtttcctaaatgtaagctttt

SEQ ID NO: 208 - DNA, 278 bp, Homo sapiens
aaaatgcactaccccttttttccaacacggagcttaaaacaaattaatgaaagagtggaaaattcaaaataagggcaagagataaggttttttttttttttcctttaagatagactcaggataggtagatagctttcactgatgtagatgtggaataaattattacttcaggaaaaaaattcccaaacatcttatgaaaaagtatacaactctacttcaaaatatgctatttactcactgccaaagacagttttatttgaaatcttgtttctgtattt

SEQ ID NO: 209 - DNA, 234 bp, Homo sapiens
  misc_feature 26: n = A,T,C or G
cctcccaaatttagcaggtgctgggnaggaccctagggagtggtttatgggggctagctggtgaaactgccctttcctttctgttctatgagtgtgatggtgtttgagaaaatgtggggctatggttcaggcgcacttcacatgtgcaaagatggagaaagcactcacctacacgtttaggctcagaatgttgattgaaacattttgaatgatcaaaaataaaatgttattttt

SEQ ID NO: 210 - DNA, 186 bp, Homo sapiens
  misc_feature 25: n = A,T,C or G
aaaataactgatggcaaaataaaanatttacatcacatcatactgtgtaaacatgtaaggtctctgtacaaagaaatatacatgcaaaataatgtaaaaatttaactgaaataataaaagaaacaatacacaaataaaaattatgaggttacgaatacacatccagtttcgaatccaatttctttt

SEQ ID NO: 211 - DNA, 403 bp, Homo sapiens
aaaaattggtaaaatatttaagtacaaaataagtagcttccagcgaggtttttataccatagtaagagcacacaatagatattactagcacacatgggttatctgggagcgctatagctacaataaacctaattatggaacagaaatttgcattctgtttccagtgctactacactcctactttctcaaaagtctgctctattaatatcagctcagtgcagtttactatgaatagtttatgtctgtgatgcaaagcattaattgttctctttttacaaacatacatttttttcataaggaagactgggggaaaacccagaaacatacagagaaaaggaaagcatcatcaaatatatgttaaaaattaagatgatgtttactactagtcatcctacaacaattt

SEQ ID NO: 212 - DNA, 345 bp, Homo sapiens
cctctttatgagttcattactgctgttcagtctcggcacacagacacccctgtgcaccggggtgtactttctactctgatcgctgggcctgtggttgagataagtcaccagctacggaaggtttctgacgtagaagagcttacccctccagagcatctttctgatcttccaccattttcaaggtgtttaataggaataataataaagtcttcgaatgtggtcaggtcatttttggatgaattaaaggcatgtgtggcttctaatgatattgaaggcattgtgtgcctcacggctgctgtgcatattatcctggttattaatgcaggtaaacataaaagctcaaaa

SEQ ID NO: 213 - DNA, 318 bp, Homo sapiens
aaaatgttttattattttgaaaataatgttgtaattcatgccagggactgacaaaagacttgagacaggatggttattcttgtcagctaaggtcacattgtgcctttttgaccttttcttcctggactattgaaatcaagcttattggattaagtgatatttctatagcgattgaaagggcaatagttaaagtaatgagcatgatgagagtttctgttaatcatgtattaaaactgatttttagctttacaaatatgtcagtttgcagttatgcagaatccaaagtaaatgtcctgctagctagttaaggattgtttt

SEQ ID NO: 214 - DNA, 462 bp, Homo sapiens
aaacacatctggttctggcagcaagttatattatgcatttagagcaataggtgccctgaaagttattgttgctttttttgttttttttttcagtttgtgcgtgtcacttgaatcagaaaccaaacacatgtaaaaaaatatcatcctcaatgccccccattaactctctctccagaaggtgacaatgttagtgaactcaagactctcactgatgatggtattttacaatgaaaacacaaggaaaccctttgaggtccaattttcacatcatattctccaaatagtaaaatagcagctctacatgttgatgaaaagaaatttcaatttcttcctatttgtttttactcatatcaacattaatatgtatctggatttattaatttccaaaaagaaaattttagttaccaaatatttcagaaatttaataaagcattatatatatgtaattagcacttatctacc

SEQ ID NO: 215 - DNA, 280 bp, Homo sapiens
aaacttttctgaaacgattagctgtagccaaattatgtggttacgttttgctacattagaatttgaaaatgcaatatgtgtggtaaatctactgtttgaaatttataatggtctctgatatgattcgaattttggtaacttttgaaagttattttccccctttagtcatggatttctatttgttttttaatgttaatttttctagaaagcatctgaattgactaggcttttcctatataaaaaactcaaaacttgttaactctgtactttaataaaattt

SEQ ID NO: 216 - DNA, 210 bp, Homo sapiens
aaaatctctggcttcaaagtttcttggggaaaggtcggtttacctcacattttttgtttccattagtaatattctaggtacctcacaaaatgtattatggtgccatggctgttagtttttagtgagtgctgtaggattaattcgaaaataggcagaattccattcctcccaaggtggcaaaaattagctatactgatgtaattgtcattt

SEQ ID NO: 217 - DNA, 398 bp, Homo sapiens
ctggagctgctagaacttgagatgagggcaagagcgattaaagccctaatgaaagctggtgatataaaaaagccagcctaggtatttaacttgattttgaattttaggtatgtttgaacaaagccacatcatttaattttgtatctaaaatttatttggggtcttatatgttatttctcatgtaacccttattaggactcattttagccctaaattacctgtggctgtttctttttatttttttgactacttttatattataaatgtgtgttactgtcttatgaattcatggcaatatagttggatagcctggatactttgttagatgagtatttagctgtgtctgcaaatcttaaaagccattagcaaagagtcgtggtatttttttctttattttt

SEQ ID NO: 218 - DNA, 487 bp, Homo sapiens
ctgccgccggtcaggctggttaaagatcaggtcccccaggaccttgcgatttatgtcgccattctccagcaagacctcagtgccgaagacctctacgatgcgccggtgggcagggtatcctggctgcacgacgtgccgggccatcacgtccacgtcaatcaccgcacagcccagtttcagtgtttttacacattatattgttataatctcacaataactataaattaggtagaacaggaaatgaggtttggagaagatacttgacttatccgaccatctgtacttgtcccatagtaaggagcctcaagcagagacaaaggaggaagttgcctatgttgtatggtttacaggccataaatgaatgtcatctttttcctcccctggggaaaaatgtctcaaaaatcccaccataggacatgacatctccagaacctctattacaaaatacacatttcctgtagaggggtaacaaatttgggttaacctg

SEQ ID NO: 219 - DNA, 390 bp, Homo sapiens
aaaaaatacaccacacgatacaactcaatacaggagtatttcttctcaaattcttctagcaccatcaacattcttcaagtatctgaaatactattaattagcacctttgtattatgaacaaaacaaaacaaggacctcagttcatctctgtctaggtcagcacctaacaatgtggatcacactcatgggaaagtgttttgaggtagtttaaacctttggaagtttgggttttaaacttccctctgtggaagatattcaaaagccacaagtggtgcaaatgtttatggtttttatttttcaatttttattttggttttcttacaaaggttgacattttccataacaggtgtaagagtgttgaaaaaaaagttcaaatttttgggggagcgg

SEQ ID NO: 220 - DNA, 341 bp, Homo sapiens
  misc_feature 86, 87, 88, 188, 189, 190: n = A,T,C or G
aaaacaggcaaagttttacagagaggatacatttaataaaactgcgaggacatcaaagtggtaaatactgtgaaataccttttctnnncaaaaggcaaatattgaagttgtttatcaacttcgctagaaaaaaaaaaacacttggcatacaaaatatttaagtgaaggagaagtctaacgctgaactnnnaatgaagggaaattgtttatgtgttatgaacatccaagtctttcttcttttttaagttgtcaaagaagcttccacaaaattagaaaggacaacagttctgagctgtaatttcgccttaaactctggacactctatatgtagtgcattttta

SEQ ID NO: 221 - DNA, 234 bp, Homo sapiens
ccagggggaattgagggaggctctaagctaggggcactgcatggtgggacaggatggccccttgaggactgaaccctggggagaagacaaacagtaataataaaaacaaataacaagtactttaagaatggattgtatgacctatagtgacagatgacatcactaatactgaaagcttcttatattaataattttggcaaaatgtcattttgtaatatagtatatgctttccag

SEQ ID NO: 222 - DNA, 186 bp, Homo sapiens
aaattttcattgagttgtccatctccagcatatagggcttcaggagcagagcagaccttgtttttagtggttccatgggataaaatgggattggaggagctagaagaattcagggtctggtccaatctgccagtcttcctgaaatatcgaaaatacaccagggctgctatatcagagccaccctgg

SEQ ID NO: 223 - DNA, 486 bp, Homo sapiens
ccataagcagataagtagcagttcaactggatgtctctcttctccaaatgctacagtacaaagccctaagcatgagtggaaaatcgttgcttcagaaaagacttcaaataacacttacttgtgcctggctgtgctggatggtatattctgtgtcatttttcttcatgggagaaacagcccacagagctcaccaacaagtactccaaaactaagtaagagtttaagctttgagatgcaacaagatgagctaatcgaaaagcccatgtctcctatgcagtacgcacgatctggtctgggaacagcagagatgaatggcaaactcatagctgcaggtggctataacagagaggaatgtcttcgaacagtcgaatgctataatccacatacagatcactggtcctttcttgctcccatgagaacaccaagagcccgatttcaaatggctgtactcatgggccagctctatgtggtaggtggatcaaatgg

SEQ ID NO: 224 - DNA, 322 bp, Homo sapiens
aaatgttcactatgtcatttagtgtccaactttacggataggttgactatctaaataggcatttttagtcattaaaaaaaaatctagtcaccaggaggatccctataactcaaaataacttgtttgtaaaagaaaatttgtttacttacccattagtaagttcctgcatattcattataagatggcaaatcaaacttttctaggatgaagacagcttatttttaagttgtatagtcttagttggtttagggtctcaattttaattaataaaatacttggtttttatttgcttgtccttttgaattcctgttttaataatttt

SEQ ID NO: 225 - DNA, 489 bp, Homo sapiens
aaatgtaggaataaaatggctggcatctaagcactttagtaaaagaggtttttacaaataactaaggattgtagagcttccttctctttttttttctttttctttcttttgttttacatgaactcaacttattcctaacatttgtctacctcaaagaaatttcaagattatttagataacatggatatgtgccaaatcctttgagctgttaagatgataatttcctgctttcctcctacatcttctcctcccactccctcctttggtgtgaatattggcttcccaattaagaccttttttttttttttccagtttgttttagcttattataggttttggaggaactttgccattttgtaatctttcaaatcattcttcacccttcctcacatcagcttcctgcttttcccagtgttttactgtaaattgtgtagcatatgacaaatcttgagctgactttcctcttcactgatgtcatcttgagctctt

SEQ ID NO: 226 - DNA, 398 bp, Homo sapiens
caagggcccaccgcagagcacacctatgctatggggagccctgctggcagccccgagagccatgccatggcctgcaggagccaggctcctgtgtggatgaagtccctcttcctctgtgccttgatcccttgggggtgcctttggtcatctcttctgtcctttcctgtctctgaaatagtcatcactccccttgactctctctgttcacgtcttctcagtctgcagagttaacttctgtaaggagtttaatctggggttccaagaaaacaagttccttgttaacatagcactgactttgcaacaatagaaaactaacaaatgagcaacaatataaagagtagaggtagttctcattgggtgtaacttcaacccattctgcttgtggttagaatttataa

SEQ ID NO: 227 - DNA, 535 bp, Homo sapiens
ctgctgcatagaaaatatgctaacatacaacagtcaagtttaagcctgtgcatagagaagataaagcacttatggtaactgcaaatggtaacgagtccttaaggtttgtacaacctagtatgggtccataaggaaaaactgtagtagaaatggttaggacaaacaataaagtagaaacaggggggaaacttgagaagagaagaaagaagcaagaaaaaaagactttcaattgtataaaattcacaaaccagtaaagtataaagacaccatggagaaatggttaactctgccccaaacacccaacagcaaacaaaaccagaatgaataagcctttggcagacaattttagaaatttgaatgttacatttctcaataattcacaaacaatatattatatggtatatttatattaaatattgggaaaccaatgttgtaaatttgatgcttataatgctttagccaatgagagcacaatgatatcaatcaagctaaatgaatgctggtgttatcacaacagtgctcatttatgaaacaa

SEQ ID NO: 228 - DNA, 301 bp, Homo sapiens
aaacaataaacaccatcaaccttattgactttattgtcccttaaattatattgactgttgtgattccatcaagtttgtacactcttttctctccctgttttgcagcaacaaattgcgaagtgcttttgtttgtttgttttcgtttggttaaagcttattgccatgctggtgcggctatggagactgtctggaaggcttggaatggtttattgcttatggtaaaatttgcctgatttcttacaggcagcgtttggaaaccttttattatatagttgtttacatacttataagtctatcattt

SEQ ID NO: 229 - DNA, 420 bp, Homo sapiens
aaagttgctttgctggaagtttttataaggaatctcagattaaacctttagaagtttaattgacactaggaagccaaaccaaggctgacttcagactttgtttgtagtacctgtgggtttattacctatgggtttatatcctcaaatacgacattctagtcaaagtcttggtaatataaccaatgttttcaaatgtattctgtcatacaaagagcagatttttattgaacttgtgcaataactatattaccatacaatataaatattcatgaatagtttcccaagtctggagcgaccacatagggagaaaatgcaaatgtctcaatttttgttcacaaaagtatattttatcaaattgctgtaagctgtggatagcttaaaagaaaaaaagtttcctgaaatctgggaaacaagacattt

SEQ ID NO: 230 - DNA, 419 bp, Homo sapiens
gtgaagtcctaaagcttgcattccaccagcttctacaatagccggcttattactagagcagacagatagcaccttcagcactctgcttgtggtccacagtagtttttcgtaagtataggtcctcattatatttactaaagcttggggtccaccactagccagtatgatgagcttgctttcttggttgccataagctaaaatttgaaggcagtctgtcgtaatagccaagaatttaacatttgttttgttgagcaaggcaaccattttctgcagcccaccagctaaacgcactgccattttagctccttcttgatgtaataaaaggttgtggagagttgtaatggcataaaacaacacagaatccactggtgaaccaagcattttcaccagggcaggaatgcctccagacttaaagatgg

SEQ ID NO: 231 - DNA, 389 bp, Homo sapiens
ttgttcagagccctggtggatcttgcaatccagtgccctacaaaggctagaacactacaggggatgaattcttcaaataggagccgatggatctgtggtcctttgggactcatcaaagccttggtttagcattttgtcagttttatcttcagaaattctctgcgattaagaagataatttattaaaggtggtccttcctacctctgtggtgtgtgtcgcgcacacagcttagaagtgctataaaaaaggaaagagctccaaattgaatcacctttataatttacccatttctatacaacaggcagtggaagcagtttcagagaactttttgcatgcttatggttgatcagttaaaaaagaatgttacagtaacaaataaagtgcagttt

SEQ ID NO: 232 - DNA, 397 bp, Homo sapiens
ccaggataatatacacaggtttgcagctaaaactgtgcacagtgggtcattgatgctagtcacagtggaactgaaggaaggctctacagcccagcttatcataaacactgagaaaactgtgattggctctgttctgctgcgggaactgaagcctgtcctgtctcaggggtaacctgcttacatctggactttagaatctggcacacaacaaaagtgcctggcatccactactgctgcctttcatttataataatagcccttccatctggcagtgggggaagaatacactcttgacattcttgtctcctgctttagaatgctagtgtgtatctatcatgtatgcaatactttccccctttttgctttgctaaccaaagagcatatattttactgtcag

SEQ ID NO: 233 - DNA, 508 bp, Homo sapiens
cgaggagtcgcttaagtgcgaggacctcaaagtgggacaatatatttgtaaagatccaaaaataaatgacgctacgcaagaaccagttaactgtacaaactacacagctcatgtttcctgttttccagcacccaacataacttgtaaggattccagtggcaatgaaacacattttactgggaacgaagttggttttttcaagcccatatcttgccgaaatgtaaatggctattcctacaaagtggcagtcgcattgtctctttttcttggatggttgggagcagatcgattttaccttggataccctgctttgggtttgttaaagttttgcactgtagggttttgtggaattgggagcctaattgatttcattcttatttcaatgcagattgttggaccttcagatggaagtagttacattatagattactatggaaccagacttacaagactgagtattactaatgaaacatttagaaaaacgcaattatatccataaatatttttt

SEQ ID NO: 234 - DNA, 358 bp, Homo sapiens
aaatgttggtattcaaaaccaaagatataaccgaaaggaaaaacagatgagacataaaatgatttgcaagatgggaaatatagtagtttatgaatgtaaattaaattccagttataatagtggctacacactctcactacacacacagaccccacagtcctatatgccacaaacacatttccataacttgaaaatgagtattttgcatatctcagttcaggatatgttttttacaagttaatcctaaagtcataaagcaagaagctattcatagtacaagattttatttgctaagctttacaaattaaactctaaaaaattattacaatgatactgaaagatattttattggcctttt

SEQ ID NO: 235 - DNA, 482 bp, Homo sapiens
gaagaaagttagatttacgccgatgaatatgatagtgaaatggattttggcgtaggtttggtctagggtgtagcctgagaataggggaaatcagtgaatgaagcctcctatgatggcaaatacagctcctattgataggacatagtggaagtgagctacaacgtagtacgtgtcgtgtagtacgatgtctagtgatgagtttgctaatacaatgccagtcaggccacctacggtgaaaagaaagatgaatcctagggctcagagcactgcagcagatcatttcatattgcttccgtggagtgtggcgagtcagctaaatactttgacgccggtggggatagcgatgattatggtagcggaggtgaaatatgctcgtgtgtctacgtctattcctactgtaaatatatggtgtgctcacacgataaaccctaggaagccaattgatatcatagctcagaccatacctatgtatccaaatggtt

SEQ ID NO: 236 - DNA, 149 bp, Homo sapiens
cctcttcattgttcacatgtcacaggaggaggctctgagcaaaggccactggcaagttagggcaacaccaagaaggctctgcggagagactccctgtgggttggggcctggcaggaacggtgcctgtggactgtttatggtctgtccag

SEQ ID NO: 237 - DNA, 391 bp, Homo sapiens
gaagctaaatccaaagaaatatgaaggtggccgtgaattaagtgattttattagctatctacaaagagaagctacaaacccccctgtaattcaagaagaaaaacccaagaagaagaagaaggcacaggaggatctctaaagcagtagccaaacaccactttgtaaaaggactcttccatcagagatgggaaaaccattggggaggactaggacccatatgggaattattacctctcagggccgagaggacagaatggatataatctgaatcctgttaaattttctctaaactgtttcttagctgcactgtttatggaaataccaggaccagtttatgtttgtggttttgggaaaaattatttgtgttgggggaaatgttgtgggggtgggg

SEQ ID NO: 238 - DNA, 374 bp, Homo sapiens
aaaaaacaaaacaatgtaagtaaaggatatttctgaatcttaaaattcatcccatgtgtgatcataaactcataaaaataattttaagatgccggaaaaggatactttgattaaataaaaacactcatggatatgtaaaaactgtcaagattaaaatttaatagtttcatttatttgttattttatttgtaagaaatagtgatgaacaaagatcctttttcatactgatacctggttgtatattatttgatgcaacagttttctgaaatgatatttcaaattgcatcaagaaattaaaatcatctatctgagtagtcaaaatacaagtaaaggagagcaaataaacaacatttggaaaaaaaaaaaaaaaaaaa

SEQ ID NO: 239 - DNA, 200 bp, Homo sapiens
aaagatgtctttgaccgcatatgtactggaaatttcaaacgtggatcttcccaggttgtagtctttgtgttatgatcaatgaagaagggccggccgtttggcgctatcctcatttcccagccgggtggcaagaagctctgtgtgactttgtgttgtggtttgggggagttgtaaggtgatggctgtggggactgtgggtt

SEQ ID NO: 240 - DNA, 314 bp, Homo sapiens
  misc_feature 67, 71, 76, 99, 224: n = A,T,C or G
ctggtaaactgtccaaaacaaggttccaaataacacctcttactgatttaccctacccatacatatnccanatagnttttgatcaaaaacatgaaatanatccacctgcttattttaagcatattaaaaaggaaactaattggaccattttctatttgtctattttatacaaaaaggctacacaattgatacactctattcagataacaatcaattagagtgantatgaattactggcgacaccatcactcaattcttaaaaattagaaattgctgtagcagtattcactataacttaacactaccgagagact

SEQ ID NO: 241 - DNA, 375 bp, Homo sapiens
  misc_feature 302, 316, 328, 329, 333, 340, 343, 354, 355, 362: n = A,T,C or G
ccaagtccttggagttataggatattcattacttcctctcattgtaatagcccctgtacttttggtggttggatcatttgaagtggtgtctacacttataaaactgtttggtgtgttttgggctgcctacagtgctgcttcattgttagtgggtgaagaattcaagaccaaaaagcctcttctgatttatccaatctttttattatacatttatcttttgtcgttatatactggtgtgtgatccaagttatacatgaatagaaaaagatggtgttaaatttgtgtgtaggctgggaattctngctaaaggaatggnaaaaaacctgtnnttgnaaaattnacntgtcccaaagnnaaggaanctaaacgcttttt

SEQ ID NO: 242 - DNA, 387 bp, Homo sapiens
aaaggcattctctgatttacatgagaattgagaaactgagatgtatgatttgtctgttagtcaatttcacaccctttcattctcataagccccaaattttgctcagttaaggagcttgctttaggcccacctatgtaagtctgttatactagctaatgtgcccatttgaatagttcaagggtcagctaatgctctgagcttcatggctccagtataaagaacaaatttaacaaaattaagctgttactgtagccgagttacccttctgctccacacatatgtagtgggatcttgcaggatttccatagtgccaattatcaaaggccttgactacttagcattgctgtattacagatgtgcaaactgaggcactgaaaagtcaaattt

SEQ ID NO: 243 - DNA, 536 bp, Homo sapiens
  misc_feature 30, 344, 510: n = A,T,C or G
aaaccaaaaggacgaagaaaaaacactttnaaaaaaaaaaaaaaaaaagaaaaaccaaaccatattttgccacatgtgagagtacggtcaagcagtatttacaaaaaggttaacggaacaacactctgacacatgctctgagaatactgggactgctgtttcaaaaaaaaaggttcaaacttattgtcacagcatcatcacaaaatagaggatcaccattggtttgcttggcttttctttttttttttcccccaagtgaggacctaactccaaataatacaatagaatatgcaaattatcttcacatcaagagtaccccaagaaaaacgaaatccatggcacanacactgtacaagggtgcagggcagggctctgaggggcccaaaccccattttgccaactcgattttctagcattgaagggagcaaggggtcaggcatatgatggagatgatactgaaatgatttatccaaaatccatgcaaatcaagttctttggatagaggtgaanaacttggacatggctgtttcaggcag

SEQ ID NO: 244 - DNA, 397 bp, Homo sapiens; identical to SEQ ID NO: 232

SEQ ID NO: 245 - DNA, 508 bp, Homo sapiens; identical to SEQ ID NO: 233

SEQ ID NO: 246 - DNA, 358 bp, Homo sapiens; identical to SEQ ID NO: 234

SEQ ID NO: 247 - DNA, 673 bp, Homo sapiens
  misc_feature 605, 618, 635, 644, 651, 660, 668: n = A,T,C or G
gaagaaagttagatttacgccgatgaatatgatagtgaaatggattttggcgtaggtttggtctagggtgtagcctgagaataggggaaatcagtgaatgaagcctcctatgatggcaaatacagctcctattgataggacatagtggaagtgagctacaacgtagtacgtgtcgtgtagtacgatgtctagtgatgagtttgctaatacaatgccagtcaggccacctacggtgaaaagaaagatgaatcctagggctcagagcactgcagcagatcatttcatattgcttccgtggagtgtggcgagtcagctaaatactttgacgccggtggggatagcgatgattatggtagcggaggtgaaatatgctcgtgtgtctacgtctattcctactgtaaatatatggtgtgctcacacgataaaccctaggaagccaattgatatcatagctcagaccatacctatgtatccaaatggttctttttttccggagtagtaagttacaatatgggagattattccgaagcctggtaggataagaatataaacttcagggtgaccgaaaaatcagaataggtgttggtatagaatggggtctcctnctccgcggggtcnaagaaggtggtgttgangttgccggnctgttantagtatagngatgccancagct

SEQ ID NO: 248 - DNA, 149 bp, Homo sapiens; identical to SEQ ID NO: 236

SEQ ID NO: 249 - DNA, 458 bp, Homo sapiens
  misc_feature 450: n = A,T,C or G
gaagctaaatccaaagaaatatgaaggtggccgtgaattaagtgattttattagctatctacaaagagaagctacaaacccccctgtaattcaagaagaaaaacccaagaagaagaagaaggcacaggaggatctctaaagcagtagccaaacaccactttgtaaaaggactcttccatcagagatgggaaaaccattggggaggactaggacccatatgggaattattacctctcagggccgagaggacagaatggatataatctgaatcctgttaaattttctctaaactgtttcttagctgcactgtttatggaaataccaggaccagtttatgtttgtggttttgggaaaaattatttgtgttgggggaaatgttgtgggggtggggttgagttgggggtattttctaattttttttgtacatttggaacagtgacaataaatganaccccttt

SEQ ID NO: 250 - DNA, 374 bp, Homo sapiens; identical to SEQ ID NO: 238

SEQ ID NO: 251 - DNA, 356 bp, Homo sapiens
aaagatcttctctaacaagctatgggaatttggcttcatactctttctttgcaacagcagtgttctgggtgataattttgaattgatacctgttcctttttctgggttttgttggctttttgaaaaattgtctttccttatcattggtgggaggcttggtagcaaagtaacattttttggaaaagaggacagaaaaattgaactacagcttgagaacgtattctttttttcctactttgttattgcaaattgaggaatcacttttaactgttttaggtgtgtgtgtccagagtgagcaaggattatgtttttggattgtcaaagaggatgcttagtcttaaaataaaaataaattt

SEQ ID NO: 252 - DNA, 484 bp, Homo sapiens
ctggtaaactgtccaaaacaaggttccaaataacacctcttactgatttaccctacccatacatatcccaaatagtttttgatcaaaaacatgaaatagatccacctgcttattttaagcatattaaaaaggaaactaattggaccattttctatttgtctattttatacaaaaaggctacacaattgttacactttattcagattacaattaattagagtgattatgaattagtgttctacaccattactcaattcttaaaaattagaaattgctgtagcagtattcactataacttaacactacgagagacttaaaaaacagttactgcaaaaaaaaaaaagagctacttcaaagcaagcaaagtcagtaccattacagatattcttaaaaaaaaaaaaaaatttaacaagcaaggctagggtttgataaattccatcttgtgatccattcttgtgcattcttcacttcttgagtcactccc

SEQ ID NO: 253 - DNA, 379 bp, Homo sapiens
aaaaagcgcttagacttccctttccatctggaacatgtaaaattttgcagcaacaggttttctccaattccttcagcaagaattcccagcctacacacaaatttaacaccatctttttctattcatgtataacttggatcacacaccagtatataacgacaaaagataaatgtataataaaaagattggataaatcagaagaggctttttggtcttgaattcttcacccactaacaatgaagcagcactgtaggcagcccaaaacacaccaaacagttttataagtgtagacaccacttcaaatgatccaaccaccaaaagtacaggggctattacaatgagaggaagtaatgaatatcctataactccaaggacttgg

SEQ ID NO: 254 - DNA, 387 bp, Homo sapiens
  misc_feature 66: n = A,T,C or G
aaatttgacttttcagtgcctcagtttgcacatctgtaatacagcaatgctaagtagtcaaggccnttgataattggcactatggaaatcctgcaagatcccactacatatgtgtggagcagaagggtaactcggctacagtaacagcttaattttgttaaatttgttctttatactggagccatgaagctcagagcattagctgacccttgaactattcaaatgggcacattagctagtataacagacttacataggtgggcctaaagcaagctccttaactgagcaaaatttggggcttatgagaatgaaagggtgtgaaattgactaacagacaaatcatacatctcagtttctcaattctcatgtaaatcagagaatgccttt

SEQ ID NO: 255 - DNA, 225 bp, Homo sapiens
  misc_feature 30: n = A,T,C or G
aaatgtcttgtttcccagatttcaggaaantttttttcttttaagctatccacagcttacagcacctttgataaaatatacttttgtgaacaaaaattgagacatttacattttctccctatgtggtcgctccagacttgggaaactattcatgaatatttatattgtatggtaatatagttattgcacaagttcaataaaaatctgctctttgtatgacagaat

SEQ ID NO: 256 - DNA, 544 bp, Homo sapiens
  misc_feature 31, 445, 518: n = A,T,C or G
ccttgcttaaagcccagaagtggtttaggcntttggaaaatctggttcacatcataaagaacttgatttgaaatgttttctatagaaacaagtgctaagtgtaccgtattatacttgatgttggtcatttctcagtcctatttctcagttctattattttagaacctagtcagttctttaagattataactggtcctacattaaaataatgcttctcgatgtcagattttacctgtttgctgctgagaacatctctgcctaatttaccaaagccagaccttcagttcaacatgcttccttagcttttcatagttgtctgacatttccatgaaaacaaaggaaccaactttgttttaaccaaactttgtttggttacagttttcaggggagcgtttcttccatgacacacagcaacatcccaaagaaataaacaagtgtgacaaanaaaaaaacaaacctaaatgctactgttccaaagagcaacttgatggttttttttaatactgagtgcaaaaggncacccaaattcctatgatgaaatttt

SEQ ID NO: 257 - DNA, 420 bp, Homo sapiens
aaatgtcttgtttcccagatttcaggaaactttttttcttttaagctatccacagcttacagcaatttgataaaatatacttttgtgaacaaaaattgagacatttacattttctccctatgtggtcgctccagacttgggaaactattcatgaatatttatattgtatggtaatatagttattgcacaagttcaataaaaatctgctctttgtatgacagaatacatttgaaaacattggttatattaccaagactttgactagaatgtcgtatttgaggatataaacccataggtaataaacccacaggtactacaaacaaagtctgaagtcagccttggtttggcttcctagtgtcaattaaacttctaaaagtttaatctgagattccttataaaaacttccagcaaagcaacttt

SEQ ID NO: 258 - DNA, 736 bp, Homo sapiens
aaacaaaatgctaaacctaaaaacattgttctgtcagttcccaaattaaatctacttagaacaaaaacaaaaatttatagctcggtcacatactacttaaataatattgttcaggcatctctaaaatcctccatgttttcaagtatggaaatagaactcaaatattccacaatacagtactaaacagatggagtatttaggaaagactttgttgtcatatggcacaatattaatattttgttgcttcaatacgttttgaaataaatatcagatttttgtttttttttcctaaaagaccaaaattataatctacattaagataattctgactgtggttaagacttaagagtgtaaaatacaacatcaatattttatcacaaaagtaaagctggtaacaaattataaaaggagccagtactctactgagacaggctcggagattaaagctcatcatgatagaaatagtcatcatggagctgtctgccataatctgtggcttcactggtgagaaacaagtccgggttttccagaatctcttcttcagagagctttttgtcaccattcaaatccatttcatcaattagatgaagcgcctcctcttgtgcaatgccctgattattaggtctacccaaggtaacagctcttggggatcaagcctgccatcgttatctttgtcataatcattcaccgaatctgtctttctcacaagtatcccattctggatcttcatttgcag

SEQ ID NO: 259 - DNA, 437 bp, Homo sapiens
  misc_feature 32: n = A,T,C or G
aaaaccatactgaaatcatttaccaaataacnaagatcttaatctaaaagatagtgaatacatcatcatcatgaaatctggttttatgtgctctatgaagtacttggagaattgcttttttatttttcttttgctttattaggtcacacaaaacagaatgaattagcagaaaaatgtatgttataaaacagcatttactacttcaatttaattttttttactaacaattgtggacctttttgatgacacttatgtatgtttttaataaattatgtacttattagtacttaatgagcccttcctgcctcaatataaaattactaaacttggagaattacagattttattgtaggccctgatgttagtcactttggagaagctaaaaatttggaaatgatgtaattcccactgtaatagcatagggattttggaagcag

SEQ ID NO: 260 - DNA, 592 bp, Homo sapiens
ttttttttttgaaaaatataaaattttaataaaggctacatctcttaattacaataattattgtaccaagtaattttccttaaatgaactctttataatgcataatttacagtataagtagaacaaaatgtcatgacaaaagtcattgagtacaagacttgtaataaaaaggcataaaatatatttatacataaacccctttcaaaaaacaagggaaagcttgagccctcaatatagggcgacacacggagcgggtgaccgtgcaggtacaggtactgtactgatttaaagtcaagcactagagatagtggattaatactcttttgccgtacactatatacagatgtatagtacaagtaacaatggcaaacagaatgtacagattaacttaacacaaaaacccgaacatcaaaatgaaggtgtgtggaggaaaggtgctgctgggtctccctacaactgttcatttctttgtggggcagggggtagttcctgaatggctgtggtccaatgactaatgtaaaacaaaaacagaaacaaaaaaaacaaggaactgtcatttccacgaaagcacagcggcagtgattctagcagg

SEQ ID NO: 261 - DNA, 450 bp, Homo sapiens
gtggcagggcccagccccgaaccagacaagggacccctcaaggagcttcattctagcatgagaaaattgagaagtaaaccagaaagttacagaatgtctgaaggggacagtgtgggagaatccgtccatgggaaaccttcggtggtgtacagatttttcacaagacttggacagatttatcagtcctggctagacaagtccacaccctacacggctgtgcgatgggtcgtgacactgggcctgagctttgtctacatgattcgagtttacctgctgcagggttggtacattgtgacctatgccttggggatctaccatctaaatcttttcatagcttttctttctcccaaagtggatccttccttaatggaagactcagatgacggtccttcgctacccaccaaacagaacgaggaattccgccccttcattcgaaggctcccagagttt

SEQ ID NO: 262 - DNA, 239 bp, Homo sapiens
  misc_feature 32: n = A,T,C or G
taactttgatgacaaaatctaaaattaaaganttagtcttaaaagcctatagtgacttgtttacttgcataaataatattttcacttagtacaggctattaatataagtaatgagaatttaagtattaactcaaaaaaagatagaggctccaaacttttctaagaaattaatgcattttcaaagtaataatataatcaatctgtaagtcaaaagtaatttcatattcattgccaaattt

SEQ ID NO: 263 - DNA, 376 bp, Homo sapiens
  misc_feature 27, 32, 65, 362: n = A,T,C or G
aaaaaaaaaaaaaaaaaattccttgtngtttnttagaggaaaaaaagaaaaaccccaacttttancactgatactacatattgctctgttaaagaattttctctgccaaaaaaaagaaaaaacaaaaaaacgcttaaagctggagtttgacattctgctttcagatgctgtctttttattagtgagtgatgatggtttgctaataatcaataggtaataattttttgtaatcccatcaagtggctccatatgtttctgctctctcgtgactgtgttaatgtttaactgttgtaccttaaagccgaaatcagtaactatgcatactgtaaccaaggtattgggcttacagagttgtttgttgnataaagaaaatttt

SEQ ID NO: 264 - DNA, 207 bp, Homo sapiens
aaattagcattccacaaatatacaggtaatttaataattattgtgcatgaatacatacacaatgcttatatatacaaattccagtttgttttcatgtgctggcaagggatttgtatacaatcataagctgtgttcatattggtcccattgaatattcacaatacaaaagcacaaaagaaccattgatttacaaaaggaaatctattt

SEQ ID NO: 265 - DNA, 388 bp, Homo sapiens
  misc_feature 1, 31, 65, 68: n = A,T,C or G
naactgcactttatttgttactgtaacattnttttttaactgatcaaccataagcatgcaaaagnccnctgaaactgcttccactgcctgttgtatagaaatgggtaaattataaaggtgattcaatttggagctccttccttttttatagcacttctaagctgtgtgcgcgacacacaccacagaggtaggaaggaccacctttaataaattatcttcttaatcgcagagaatttctgaagataaaactgacaaaatgctaaaccaaggctttgatgagtcccaaaggaccacagatccatcggctcctatttgaagaattcatcccctgtagtgttctagcctttgtagggcactggattacaagatccaccagggctctgaacaa

SEQ ID NO: 266 - DNA, 616 bp, Homo sapiens
  misc_feature 32: n = A,T,C or G
aaatacagagtcaaaagatgatttataaaatntaaaacattttctgcttggccgtatttgaagacaagctgaatacatatctatgttctgaataagtccactatggatatatataggaagagatatacatatatccatccacagatacacacacacatatatatttctgcatgtatatatacataattctttctatagttacaggaaatacttcttctataattctgattttgactcccatcctccaccatttactcatccactcattacctaaatcttggctttctttcctatattgtaaataatccatccaaacttctagccagtactgtcaggagggttcttgctcgagtgagctgttaatactattttccactgacaacttctgcacatcgaggacacagtgtatctgaagactccgctgtatacttccaacaacgggggcatttttctttcgtagtcggcatgacaattactttataggaagactcttcacgaatatcaccaccttctaagttgatgaggaatttccctttaagctcgattacatctgcagtcatctctcgtggttcctgaccagtaaagttgactcagaagccatcattaattcattcaa

SEQ ID NO: 267 - DNA, 341 bp, Homo sapiens
ccattatgtatgtattttcttgaaaaatacttatttcagctacttatttttaatagttacttattcttgttgtattgtcatttgagttttgtatatatttttgatattaaccccttgtcacatgtataatttgcaaatattttctccctttttttagttgtcacattctgttcattgtatcagattctgtgcagcagctttttaatttgaagtgatctgactgacttgttcttccttttgtgtcctgggatatttaggttaaatcaaaaaacttgctgcccagaccaatgttatggggctttcactctattttttggtagtagtagtttaagagttttagg

SEQ ID NO: 268 - DNA, 367 bp, Homo sapiens
  misc_feature 31, 66: n = A,T,C or G
ttgtagattggaatagcaaaagtgaatgctntgaccaaaatttttgccctcctaaataaagacgtntccttctagagagcaaatctatcataaaatgtcaaaactagaagagaataaaatgaaaggaaaaaacctagaaaaatatcctaaaatatcaaatgcagtcatttctaaatataagccataattatagctttacctattgttcttattgttcctatgctgcttctacaatgttacatcaactatacttagctttactctcccaaaatcttggtgatgaagccttctgagtgtgctttccaatgtgccagaaccagaagggcattccaaggcttccccacatttcctccatttacggagacag

SEQ ID NO: 269 - DNA, 270 bp, Homo sapiens
  misc_feature 29, 33, 62, 65, 68, 70, 264: n = A,T,C or G
caaatctctccctcactagacgtaagccntttnctcactctctcaatcttatgcatcatagnaangcngntgaggtggattaaaccaaacccagctacgcaaaatcttagcatactcctcaattacccacataggatgaataatagcagttctaccgtacaaccctaacataaccattcttaatttaactatttatattatcctaactactaccgcatccctactactcaacttaaactccagcaccacgaccctactactatntcgcac

SEQ ID NO: 270 - DNA, 368 bp, Homo sapiens
  misc_feature 32: n = A,T,C or G
ctgaatcatgaataacactatataatagagtntaaggaacacaagcattagatgtgatccttgccccatacccttagattatgtcagactaaagctgacaattctgccaggctctgaacccctagtgcccccaacccaaatcttggaagcaaagaatatgccctgtcatacaactttgtacaagttgtagtaaaacaaagcttaagttttctcatctttctacagcaaatggtcagttatttaataaacactaaaatgctcctaagaatccattttgagtttgtttaccaaacacattgtgcaagaactgactacacaaaaagttcctttgaaatttggtccacaaattcacttaaggttggaaattt

SEQ ID NO: 271 - DNA, 313 bp, Homo sapiens
  misc_feature 67, 68: n = A,T,C or G
aaatttatataaaactctgtacatgttcactttattattgcataaacagcataatcttcaagacaanngtttgcaaacacatgtccaattcaggaaaaaaaatttcacgtttctcgtctggcttttttcttcttttttatttgtttgggagattcccagctagtttcagacttggtctgtgaaggaggcacactattttgcttggtatttgacttggatttatctgtctcttgtagtattggcggcacttgggaagagctcttgtcagaatcactttttgataagattacagatggctcggtagaagtagcag

SEQ ID NO: 272 - DNA, 462 bp, Homo sapiens
  misc_feature 31: n = A,T,C or G
aaaaaacatttattttaataagactattgcnaacacattaaaaaaactaaatagtaatattacaaaatctatatacttgcacatttagtatttgtcaatgtgccagaggttttcttcatgaaatttgacttctttgaagtgaaggcttttttctatcatctcttatagctctgactgaataagtcttaatgctttcttcatgttttctatcaataggggtaaatcccgaggctcatatgtgtacaatctgttagagtatcttccagctatgtcagctctaactgttaaagaagggtctacaaacatgattctaggcacatattgcccatcaggtgataaattcttatcagtggtttcatgcataaggtttagcatgatgaacttattctgagccatttcttgtatttcttcattttgggcaaatactttctttagtgcttgagagtattgacaatcctccag

SEQ ID NO: 273 - DNA, 282 bp, Homo sapiens
  misc_feature 30, 66, 67: n = A,T,C or G
ctgatcaaagcatgggatattttaatagtnttatacataatatttttacatagaaaactttacatnncatttcatattatataattctgcttattctttcaaaaatttatacatccattgggcaaggaatggttttcattaaattaccaatattaaatgcacttaatcattgtgtataggttaaaccaaagtaactattaactaacttttaggcattttaaggaggtaaaacatacattttacacataagtatttgatgcaaatatgcagataaaatttttt

SEQ ID NO: 274 - DNA, 125 bp, Homo sapiens
  misc_feature 30, 33, 63, 68: n = A,T,C or G
cagccctagacctcaactacctaaccaacnttncttaaaataaaatccccactatgcacattnaatcnctccaacatactcggattctaccctagcatcacacaccgcacaatcccctatctagg

SEQ ID NO: 275 - DNA, 528 bp, Homo sapiens
  misc_feature 33, 68, 470: n = A,T,C or G
aaagctgtggaaaagctttattatagatttttntacagaattaaaaaagttcaaacaataataagccnggaaccacaaataattaaaaggaaacacagcaatcccataaacaagcattctggcatctgttagaaattttccctcaaattatgaaatgtagctctccatgctttccaatgattgttataatacccacaaatatctgtgatttcagtggaatactttaacaaaagttttctttttaaggcatgatcctgattcattttttcttcaatatctcagtcatttcaggaactaccttaaataaatctgcaactattccataatctgccacttggaaaattggagcttctgggtctttattaattgccacaattgtcttgctgtctttcatcccagctaaatgttggatggctccagatattccaacagcaatataaagttctggtgctactatttttcccgtctgnccaacttgcatgtcattgggaacaaagccagcatcaacagcagcacgggaagcaccaa

SEQ ID NO: 276 - DNA, 420 bp, Homo sapiens
  misc_feature 30: n = A,T,C or G
aaatgtcttgtttcccagatttcaggaaantttttttcttttaagctatccacagcttacagaaacctgataaaatatacttttgtgaacaaaaattgagacatttacattttctccctatgtggtcgctccagacttgggaaactattcatgaatatttatattgtatggtaatatagttattgcacaagttcaataaaaatctgctctttgtatgacagaatacatttgaaaacattggttatattaccaagactttgactagaatgtcgtatttgaggatataaacccataggtaataaacccacaggtactacaaacaaagtctgaagtcagccttggtttggcttcctagtgtcaattaaacttctaaaagtttaatctgagattccttataaaaacttccagcaaagcaacttt

SEQ ID NO: 277 - DNA, 668 bp, Homo sapiens
  misc_feature 31, 63, 566: n = A,T,C or G
ccagggtggctctgatatagcagccctggtntattttcgatatttcaggaagactggcagatngcaccagaccctgaattcttctagctcctccaatcccattttatcccatggaaccactaaaaacaaggtctgctctgctcctgaagccctatatgctggagatggacaactcaatgaaaatttaaagggaaaaccctcaggcctgaggtgtgtgccactcagagacttcacctaactagagacaggcaaactgcaaaccatggtgagaaattgacgacttcacactatggacagcttttcccaagatgtcaaaacaagactcctcatcatgataaggctcttacccccttttaatttgtccttgcttatgcctgcctctttcgcttggcaggatgatgctgtcattagtatttcacaagaagtagcttcagagggtaacttaacagagtatcagatctatcttgtcaatcccaacgttttacataaaataagagatcctttagtgcacccagtgactgacattagcagcatctttaacacagccgtgtgttcaaatgtacagnggtccttttcagagttggacttctagactcacctgttctcactccctgttttaattcaacccagccatgcaatgccaaataatagaaattgctccctaccag

SEQ ID NO: 278 - DNA, 202 bp, Homo sapiens
  misc_feature 30, 32, 63, 66: n = A,T,C or G
aaattggtatcgacggcaaccaggggaagntnctaaactcctaatctattctggatccaattngcnaagtggggtcccatcaaggttcagtggcagtggatctgggacagatttcactctcacgatcagcagtctgcaacccgaagattttgcaacttactactgtcaacagagttacatgtccccgtacacttttggaccc

SEQ ID NO: 279 - DNA, 694 bp, Homo sapiens
  misc_feature 63, 526, 577, 580, 586, 599, 608, 620, 624, 642, 643, 651,660, 668, 681, 687, 692, 693: n = A,T,C or G
ctgtacttggacaaaataagttaattctatttggttgtccattaaagttttatgtggctatgnacccactggagctaaaaattggcttttaactgtttccaaatcagaactagcagaggagagaagtaaataaagccaatggcactcccttcagaggctcaaaatggttagattttgatgcagatttaaccttagcgagtttcagtcagtccatttagatgatcctgtaggttcatacaaatacactgaaccgttggtttaacttctcttccttcctcaaagtttatgataaagagactcatccctgtattgggagtgactgacataagttcagatctgctcagagtggctggtaaggaacacttaaggtcagtcagaaaataatcaaacagacttctcatgtaagcaccgtgactcacaactaagacactggctgctaatcctggaataccgctgtctgaattaactttagagctgtgattttttcctaaaggaaatatctctgccaaagaagtttccagacagntgcttgggagatccttggggaaaactggtctttttgatccggttctttcangantaggtngacaaaagaaatncaaaaaagnctatcccacgcntttntcacctgggcccagcggnnctcctccnggggggggnaaacacangggactcttcccngggctngcttnng

SEQ ID NO: 280 - DNA, 441 bp, Homo sapiens
aaaaaacttccatgcaacttctggtttattgtttggcaactccacatgataaaaaaataaaaacagcccaaccgagtttcggaattaagtattcttctagtaagtgattcaaacttgtaatatttgccacaggactgacttatttatttactagctagaagctcttaagttcacttgtttatcagggcatatacagaagggtttgttaaaactcgatgttaactttacaactttctgacctggtgcatgaattctcaagtactgtatttcactgtgttggtgtgtctgatggaaatttcgaggtggtcccacaaaaatattttatgtagtgtgccttcaaagagaaccatttatttctcttcacttatcgtcccacaaagtcacatttggtggtggtcagccaagtcgcatctggtctagttttactcttgtcccaatttt

SEQ ID NO: 281 - DNA, 398 bp, Homo sapiens
aaatttgttaggtctgaagaatctaaaactgttaatttaacccttaacttgtgcctagaaactacagcacatataaaatatgtaaacaccagcctgttgctgtacttttctgcttattttacagcctcaaatatttctcattatcttgtcacttagttcttcatgtttctccttctgacttttaataatggtaataggaaaacaaaacccaaagcttttcagaacttcagtgtgaggtttcctattttgacaagttaacttgtaaatactcaggttttacgatgtataatttacctaatagaccaaactaactcatggagatattttgaactattatttaggtacaaactttataaagaatgttagtatgtcataaaatataacattacagcttattt

SEQ ID NO: 282 - DNA, 226 bp, Homo sapiens
  misc_feature 31, 65: n = A,T,C or G
aaaacaatattctctttttgaaaatagtatnaacaggccatgcatataatgtacagtgtattacnccaatatgtaaagattcttcaaggtaacaagggtttgggttttgaaataaacatctggatcttatagaccgttcatacaatggttttagcaagttcatagtaagacaaacaagtcctatctttttttttggctggggtgggggcgcccaggccgaggctgg

SEQ ID NO: 283 - DNA, 358 bp, Homo sapiens
aaacaaaaatactcaagatcatttatatttttttggagagaaaactgtcctaatttagaatttccctcaaatctgagggacttttaagaaatgctaacagatttttctggaggaaatttagacaaaacaatgtcatttagtagaatatttcagtatttaagtggaatttcagtatactgtactatcctttataagtcattaaaataatgtttcatcaaatggttaaatggaccactggtttcttagagaaatgtttttaggcttaattcattcaattgtcaagtacacttagtcttaatacactcaggtttgaacagattattctgaatattaaaatttaatccattcttaatatttt

SEQ ID NO: 284 - DNA, 288 bp, Homo sapiens
aaaacttttgttaagaaaaactgccagtttgtgcttttgaaatgtctgttttgacatcatagtctagtaaaattttgacagtgcatatgtactgttactaaaagctttatatgaaattattaatgtgaagtttttcatttataattcaaggaaggatttcctgaaaacatttcaagggatttatgtctacatatttgtgtgtgtgtgtgtgtatatatatgtaatatgcatacacagatgcatatgtgtatatataatgaaatttatgttgctggtattttgcatttt

SEQ ID NO: 285 - DNA, 629 bp, Homo sapiens
  misc_feature 31, 34, 35, 115, 435, 526, 585: n = A,T,C or G
cctaaaagcagccaccaattaacaaagcgtncannctcaacacccactacctaaaaaatcccaaacatataactgaactcctcacacccaattggaccaatctatcaccctatanaagaactaatgttagtataagtaacatgaaaacattctcctctgcataagcctgcgtcagattaaaacactgaactgacaattaacagcccaatatctacaatcaaccaacaagtcattattaccctcactgtcaacccaacacaggcatgctcataaggaaaggttaaaaaaagtaaaaggaactcggcaaatcttaccccgcctgtttaccaaaaacatcacctctagcatcaccagtattagaggcaccgcctgcccagtgacacatgtttaacggccgcggtaccctaaccgtgcaaaggtagcataatcacttgntccttaattagggacctgtatgaatggcttcacgagggttcagctgtctcttacttttaaccagtgaaattgacctgcccgtgaagaggcnggcatgacacagcaagacgagaagaccctatggagctttaatttattaatgcaaacagnacctaacaaaccccacaggtcctaaacttacccaaaccctggca

SEQ ID NO: 286 - DNA, 485 bp, Homo sapiens
aaatgtacttgctcagctcaactgcatttcagttgtattatagtccagttcttatcaacattaaaacctatagcaatcatttcaaatctattctgcaaattgtataagaataaagttagaattaacaattttattttgtacaacagtggaattttctgtcatggataatgtgcttgagtccctataatctatagacatgtgatagcaaaagaaacaaacaaaagccaggaaaacactcattttcgccttgaatatgtaaatgggattaattttgtcctgtgccttatgtggaaaggaacttctttggttttccttttttgttctggtggaagcatgtgcaggagacatatcatccaaacataaaccattaaaatgtttgtggtttgcttggctgtaattttcaaagtagttaattgaggacaaagggtaatgcagaagtgatagctttggtttgctgagtcttgttttaagtggccttgatattt

SEQ ID NO: 287 - DNA, 340 bp, Homo sapiens
cctggagtccaataaccaccccctcataccacaccctgtgcatacaccagccaagcctttcctggtctgggaagggaagagaaaaaagacgcaggccacctgggggttctgcagtctttggtcagtccagccttctatcttagctgcctttggcttccgcagtgtaaaccttgcctgcccggaggcaggaggcccagctggacctccgagggccatgagcaggcagcagccatcttggcctcaagcttgcctttcccttgagtccctctctcccctcggctctagccagaggtgtagcctgcagatctaggaagagaagagctggggaggaggatgaagg

SEQ ID NO: 288 - DNA, 290 bp, Homo sapiens
aaacagtctctcctcggtgttctccttgtcaaactgttcatcccagtttcctctgaaatagacagcattcaccagaaccagccttgtcaatggatccactgagcccggagagagcaactccgcaattttaccttctgtcttttcagctacccaggtgtttatgtgttttctggacttctctacggcgctgataaagtcaagctcctccatctctgcttggtagaatttttggcaggaatctctaaaagatgagaggaaatcacaagacttttccccaaagagcctgttgg

SEQ ID NO: 289 - DNA, 404 bp, Homo sapiens
ccacccacgcttaggttcccatcacactgatgactccgggtttggcgagcacaggagcgcaaaccttttcacattctttctgtgatccaaatttgttttcgtttccaccacaacctccataccagaatcttgcacagcttttggtgtttggatcatagtaccattttaatatgaaatccctgcaagttccttcgtctttcggcaacttgcatatatctgtttcagtgagagccaatggttctgtgctcaccattagattgatggttgaactagaagctgaccttgctggctgtggaggtgggggctgagatttctttgtactgaaacttccgtggtaggtggctctgacctgagacctcaggtagcagaccacagccacatggtatgtctgcccagcgagcagg

SEQ ID NO: 290 - DNA, 384 bp, Homo sapiens
  misc_feature 305: n = A,T,C or G
ccaggcgctccttgtcggcatcagggagggtggccttgaactgctcatgggctgtggtcagtccctggatctcctcaatggtgtgcacaatgaaggtgtcctgcaggtcctccatggccccctccatccagttgttgaagggtgcagcccgcttggcatactccaagtacagctggtcaatggtctccagcagtttctcggtccgctccagagcttcccttcgcttctgagttagggcccccagattgtcccactggtcacagatcttttggcaacgggcgttgacactgggtgagtcataatantccagctcattgagctcctgtgcgatggcggcaatctgctccacacggtcctggtgggcagccaggccactctcgaagg

SEQ ID NO: 291 - DNA, 278 bp, Homo sapiens
aaagtttatttttactatttctttatcactttattgtatcatcaccattggtttcataatgtaaatactatatgttgaacaaattaaatgtcaaaattttttattaccatagtccatgttaatagtggggctttcaggtgtttagagattttttttgttgttgttaacattcattgcaaaagtactagatggtgtataactctagagttgaattttaagggattccctaatatgtatactatctttttatctgaagtaataaataaacaatgatcttg

SEQ ID NO: 292 - DNA, 177 bp, Homo sapiens
ccttggcccggtcattcttgtccagtttgataggttcaggaaattcgttgtacagctccacctccgtttcctgcttaagtgcattccgtgcaatcgtctggaacgcctgctccacgttgatggcctccttggcactggtctcaaagtagggaatgttgtttttgctgtagcaccagg

SEQ ID NO: 293 - DNA, 403 bp, Homo sapiens
aaaaagaaggacttagggtgtcgttttcacatatgacaatgttgcatttatgatgcagtttcaagtaccaaaacgttgaattgatgatgcagttttcatatatcgagatgttcgctcgtgcagtactgttggttaaatgacaatttatgtggattttgcatgtaatacacagtgagacacagtaattttatctaaattacagtgcagtttagttaatctattaatactgactcagtgtctgcctttaaatataaatgatatgttgaaaacttaaggaagcaaatgctacatatatgcaatataaaatagtaatgtgatgctgatgctgttaaccaaagggcagaataaataagcaaaatgccaaaaggggtcttaattgaaatgaaaatttaattttgttttt

SEQ ID NO: 294 - DNA, 305 bp, Homo sapiens
  misc_feature 231, 236, 237, 242, 253, 265, 273, 299: n = A,T,C or G
aaagcaatctggcatggtgtcctgtagtgaagcagaggatcataacataagtaaactctctatgggtggaagttggagagaaggacattttggctttgtacatgaaaagactctccagatagaaacagattctgcccataagtgaaataaaatgctttgtgggggtaatgagtgacttatagtattcaggcagatgttacataactgctaattaagtttccctggattgantttanncaaanaattgaaagtngattttggtcangtgtcagnaaactactgcctataaacccatatcntaccca

SEQ ID NO: 295 - DNA, 397 bp, Homo sapiens
  misc_feature 304, 315, 356: n = A,T,C or G
cctatctggttggcctttttgaagacaccaacctgtgtgctatccatgccaaacgtgtaacaattatgccaaaagacatccagctagcacgccgcatacgtggagaacgtgcttaagaatccactatgatgggaaacatttcattcccaaaaaaaaaaaaaaaaaaaaatttctcttcttcctgttattggtagttctgaacgttagatattttttttccatggggtcaaaaggtacctaagtatatgattgccgagtggaaaaataggggacagaaatcaggtattggcagtttttccatttncatttgtgggngaatttttaatataaatgcggagacgtaaagcattaatgcnagttaaaatgtttcagtgaacaagtttcagcggttcaactt

SEQ ID NO: 296 - DNA, 447 bp, Homo sapiens
ccatcctcgatgttgaagttgtcgtggggcccgaagacgttggtggggatgacagcggtgaaggtgcagccgtactgctggaagtaggccctgttctgcacgtcgatcatcctcttggcatacgagtacccaaaattgctgttgtggggaggcccattgtggatcatggtctcatctatcgggtaggtcgtcttgtcagggaagatacaggtggacaggcaggacaccaccttgcgggcgcccacctcgaaggccgagtgcaggacgttgtcgttcatgtgcacgtttttcctccagaagtccaaattgtatttgatattccggaacaggccccccaccattgcagcaagatggatgacgtgtgtgagttggaccttctcaaacagggcgcgggtctgtgctgtatccgtgagatcggcgtctttagaggagacaaacacccagtcc

SEQ ID NO: 297 - DNA, 681 bp, Homo sapiens
  misc_feature 426, 432, 634, 668: n = A,T,C or G
aaataacagcatgtaaaatattaaaatacaagctttcaaaaataaatacataaataagtagaaccctcgtaagaaatagtcaaacacattaagtcctttccagctgtccctagaaagctgctgttctctttttcattttcagctctggtaagggcagggaccaccctgcaggaagtgtcaatgatacgctgataagcttcttacttctctcctgtcagttggtgctccccctgtgatgagaaaagggttactgttgcaggtgctaaggaaggctgctcttctgtcactctgaagttgcttggagggatgtccccatgcagactctctcccagccctccactcagggaaggtctgtctgtacccactgccttctatagcagaaaacttgcactcctgaatgctttttttttttttcaagaaagaagnggctgnggactcaactagattcttggtttgaaaaagccaaaacatattggtcactgattgtcacattgggttagaaatgtccattcatgatctcccttaagctgcacacaaccctatgaaataactaccattatctaccctattttgctaaagctcaaagagattaaataatgttgacagggatcttagccttgaactcactgaaggngttactgcaaagttctgctcttcaccaagaaggnttacaggccaaag

SEQ ID NO: 298 - DNA, 353 bp, Homo sapiens
  misc_feature 68, 72, 169, 182, 262, 263, 264, 269, 275, 335, 343: n = A,T,C or G
cctggcttaagaccagacatttgaagaaggctccaggcagggaaaggaaaggagaggccagccccacnctgncccctccctgcccccacgtctccagcaacacaaggcggccagtggaccgtgaaccatttatttccaaactataaagaaacctgctctctgagaaaanacactgcccaggngatgaagctccagcccctggaggtccaaaacccagtccaaactcagtccctttagaaagctgctgtgccttggaaatgannntcggntgtcanagcctgggaagtggtgggaagaaccagcccactcccctctcctgctgcgattccagcgcncgttgggnccagatctgg

SEQ ID NO: 299 - DNA, 560 bp, Homo sapiens
aaagttcaaggactaaccttatttatttgggaaaggggaggaggaaggaaatgatatggtacccagacactgggctaggctgcaactttatctcatttaatactcccagctgtcatgtgagaaagaaagcaggctaggcatgtgaaatcactttcatggattattaatggatttaagagggcatcaatcagctcaactcaagatttcataatcatttttagtatttagattgtgcctcaaagttgtagtacctcacaatacctccactggtttcctgttgtaaaaaccttcagtgagtttgaccattgtgctcttggctcttgggctggagtaccgtggtgagggagtaaacactagaagtctttagtacaaaactgctctagggacacctggtgattcctacacaagtgatgtttatatttctcataaagagtcttccctatcccaaggtcttcatgatgccagtagccatatatgataaattatgttcagtgataacttagttatcagaaatcagctcagtggtcttccccgccatgattcacatttgatgagttttt

SEQ ID NO: 300 - DNA, 165 bp, Homo sapiens
  misc_feature 120: n = A,T,C or G
aaaaactacataggggtgtgtgtgtgtgtgtatgtttattttatacacacatatttgtatattctaatatattactaaggcaattttaatgaattaccatgtatataaaaaaatatctgncacttggcacacaggtttgtatgtatgtgtatatatatatgtatg

SEQ ID NO: 301 - DNA, 438 bp, Homo sapiens
aaaatatatgtatttaaaaacaaaaagcaacagtaatctatgtgtttctgtaacaaattgggatctgtcttggcattaaaccacatcatggaccaaatgtgccatactaatgatgagcatttagcacaatttgagactgaaatttagtacactatgttctaggtcagtctaacagtttgcctgctgtatttatagtaaccattttcctttggactgttcaagcaaaaaaggtaactaactgcttcatctccttttgcgcttatttggaaattttagttatagtgtttaactggcatggattaatagagttggagttttatttttaagaaaaattcacaagctaacttccactaatccattatcctttattttattgaaatgtataattaacttaactgaagaaaaggttcttcttgggagtatgttgtcataacattt

SEQ ID NO: 302 - DNA, 172 bp, Homo sapiens
ccaaaacaggagtcctgggtgatatcatcatgagacccagctgtgctcctggatggttttaccacaagtccaattgctatggttacttcaggaagctgaggaactggtctgatgccgagctcgagtgtcagtcttacggaaacggagcccacctggcatctatcctgagttt

SEQ ID NO: 303 - DNA, 552 bp, Homo sapiens
ccagcctgttgcaggctgcttcgtagcgggcgtcggctgcggacttcccttcccgggtctggatcttttcatcctaccagatgagaaagggaatgagtgaatggagtgaccccgcaccctgtcactttcctgagacatgactgccaggaagaagagctgctctggtctccatcagggctggcaggacaaactgaccagtgagtcagtaggcagagttcacactgaaaaagggcacaagggctgtcccacaatgggaggaaatggggtctcagaacttctacttctctgaaaactaagacacaattgggacaaccaccacccccgtgtgagatttctcacctcgagacaggacaagatgaagttcacggcttcttctggggtaaagaccttgaagagcccatcacaggccaacaaaatgaacctacaacaccagggagaaatataaacgggttttaggcccaaccaaaaaataaaaaataaaaaaagggcctggagatggagataaaataaatatttgtccaactattcaaaggctaaggtttttttttcttt

SEQ ID NO: 304 - DNA, 601 bp, Homo sapiens
cctttgattcttggtagtacattgcatgtaaaatgtttataagaagctacttttccttcatgggaagaaattcccacatgagattcataaattcttagactccgtggcttctttggtccggaatgcttaaactcatatgagtgttctggatcccagtgtatccaatcataattcacattatcaccttcacgaaccacatactttgcccacggtgaaatacgatacaagatctctccgcttttactagtaataactacctttaatttggatccatgaggcacgagtacagatttattctgctttggtgggatatacagctcccattttccataatccagttttttgtatgggtacgaaaatggattccaaccattaaaatctccagtaagaaaaactccttctgctcccggggcccattctttgcagtataaaccaccatcagcacatctgtggacgccaaatgattcatagcctctggaaaacttatcaataccaccttcattttctccaatgttcttcaaaatttggctaaactgcttatacctgcgctggaagtccacggcgtagggcttcaagtaccggtcgatctccaggagtctgg

SEQ ID NO: 305 - DNA, 401 bp, Homo sapiens
aaataacagcatgtaaaatattaaaatacaagctttcaaaaataaatacataaataagtagaaccctcgtaagaaatagtcaaacacattaagtcctttccagctgtccctagaaagctgctgttctctttttcattttcagctctggtaagggcagggaccaccctgcaggaagtgtcaatgatacgctgataagcttcttacttctctcctgtcagttggtgctccccctgtgatgagaaaagggttactgttgcaggtgctaaggaaggctgctcttctgtcactctgaagttgcttggagggatgtccccatgcagactctctcccagccctccactcagggaaggtctgtctgtacccactgccttctatagcagaaaacttgcactcctgaatgc

SEQ ID NO: 306 - DNA, 313 bp, Homo sapiens
aaactgactatggattccttgaaggtctggcagttgttgatgatggcgatcatgtactgaacgtagcagtgagggtgctgccgattcctcaggtgctcttctttatacagctgcgcttcatctttatatctgaggacagacaggcttcggtcagacagcactaagggcaacatggagctgtttcaaatgccacgctgacgtcacgcctggcctgaaatttcacatcactaacatctgaccggatgagcctctaaaaataaaacaatctttagacgatccagactaatggaaggacagagaggttgattacttt

SEQ ID NO: 307 - DNA, 366 bp, Homo sapiens
  misc_feature 11, 219, 232, 313, 321, 327, 342: n = A,T,C or G
aaagatgctgntaatgaacattacggacaattcatggtgtggctagttggtaacacttcagctgatttttcttatgagatggaaaaaaaaaatcagccaagtaagggcacatcttcacttcatttataagtcagcatccaaggtaaaagaattctctgttggacttgacatcactcccatcctctgatactcgcctactctcttctcaaagaagttagntctttccttccantgaaatattctcataaaagtcaaatgggttctctactctgaaaaccttgctaaaacccaattccagcataagtttgtctgncacaaacncaatgnattgcttcattaaantgcaattcatcccaatgagcttcc

SEQ ID NO: 308 - DNA, 534 bp, Homo sapiens
  misc_feature 486, 529: n = A,T,C or G
ccagctatcagctgatcgtcttctgtctggacgctcgtcctgcttctgacatcaaaatcttctgtctcaaagtcagagtcatccaactcctcaggggtccttatcatcagcactgctttcctgatgtcccggatgccatcatataccaggcgggaagcatcgataaactcattctcatccatgggctgggcagggtccgagctgagggcttccacggctgcttctacttgctcagtaaaacgtggcatgactgtgttggagagcagcttagtggcttccagaaccttctctgtgtagactcctggctcatagtcgtccatctctgaggtgactacgtgaatgacccgggctgcccggcctcgaattgcaccagctgtgcggccaggccatccacatccttctcttggagagcaatgacacatttggtcacatcttccaaaatgtgattctctgagacagccaagaagtcatcaatggaagtaatgncatcgacagcatctgtgagaacaccgacttgtttttccattgntcttt

SEQ ID NO: 309 - DNA, 164 bp, Homo sapiens
catactccttacactattcctcatcacccaactaaaaatattaaacacaaactaccacctacctccctcaccaaagcccataaaaataaaaaattataacaaaccctgagaaccaaaatgaacgaaaatctgttcgcttcattcattgcccccacaatcctagg

SEQ ID NO: 310 - DNA, 131 bp, Homo sapiens
aaaaatcatttatctttcggtgcttcaacatgatgccaaacaaaaatctactgaataaaaatagcaaggaagggaatcaaacatttataagatatatttattatttttctgaccaaagtgcaatgattttt

SEQ ID NO: 311 - DNA, 626 bp, Homo sapiens
cctatgtgcgccagtttcaggtcatcgacaaccagaacctcctcttcgagctctcctacaagctggaggcaaacagtcagtgagagtggaggctccagtcagacccgccagatccttgggcacctggcactcaagcactttgcacgatgtctcaaccaacatctgacatctttcccgtggagcaacttcctgctccacgggaaagaggtcgatggatttacccctggacccataagtctgttcatcctgctgaagtcccctccccattgctccttcaagccaaaactacactttgctggttcctgtcccctctgagaaaggggatagaaagctccttcctctatgtcctcccatcgagatctgttctggggatggagcttccaacttcctcttgcagcaggaaagaatgctgctcacccttctgtcttgcagagtgggattgtgggagggattggcagccttcttctccaccacctgtccagcttcctcctggtcagggctgggacccccaggaatattatgttgccgtgtgtgtgtgtgtgtgtgtgtgtcttcttttagggagcaggagtgcatctggtaattgagggtagatgttgtgtgtgctggggaggggtccttctgtt

SEQ ID NO: 312 - DNA, 616 bp, Homo sapiens
aaaccaaagaaattaagaaaaaagacttcattgcttgaatgacgcgaacagctgtctgagtcacctagactttaacaccacctggggccctgggaatgacgctgacgagagatctgcacatagtaggcgtgggctccaaatgtgctcatcagctgacttcacatcctcacaagtcagcctcagatatgacccaagggatacgtaccatctcttcttgaaacagcgtgtcaaattatatatatgtatgcaaaaaagagtaatgtactaagcaaaccaagtttcgtctttttcttctgaatctggttttaatgtgacctgtcatccccatctttcgaatttatgagctccatcttctctagactgttaacttcttgaggaaaacatgctattttaccacctttcactgctgaatccctagcccttaagcacagtctctggcacagaataaatacgaaatgaatgagtgaatgaatggatggatgggtgaagagaaaaggcaatgcacaagatttacctatcaaaatccaccaatggtccttaaaaatggttttgtcagtagagatgctgaatatattcatataatacatttatttcaatactattaagaattctagtg

SEQ ID NO: 313 - DNA, 553 bp, Homo sapiens
aaaaaatggcagcattgtacttgaatcagaaagcttactgggatttcctcatcgaaagtagagattgcagctaatcctagtaccttttgttagtaattacttaaggcacagtgcaaagttgaaggactgttttggtacaaactcaagccagctacatgtatgcttgccttggtatccttgctagagcacatgcgggtataataccgtattatacacaacaaggccaccctgttgtatctgtgttacaattaaacatcagtcccagaaagtgaaccctagtcatttattataggtgcccacctctgacttggaacaaaatgccactccattcatgttcatttttgtcctggagaggatttatttcctaaaagattctgaaagccaacaaatcaatgtagttcttcatagagaacttaagagtaaggctcaaaatggcctcaaaatgggcttcttggatgacttccaacagtgactggccttctcaacactgcagatgtctgagcactaccataacctaacgaagtgaggaaggaggaggcaaattggtattttt

SEQ ID NO: 314 - DNA, 330 bp, Homo sapiens
ccagcgactccagcggtggcagcaggcagtgcacgtactctgggcctcccaccagggtagtgaaggttcccagctgttctgccagggccaggaggacctcatcttcatcatagatggtatctgtaaggaaaggcagaagctcacttcgggtcctttcaaccccaagggccaaggcgatggtggacagcttcttgatgctgttgaggcgaagctgaacgtcctcattgcggagttcgtctatgagcaccgcgatggggtacagcgagtcgtcgccgtcggccgccgccatcttggctccgtccctttcctgtcagactgcggccagcgctg

SEQ ID NO: 315 - DNA, 380 bp, Homo sapiens
aaaaatgacattgcgtttagcttattgtaagaggttgaacttttgtattttgtaactatctttaagcccttcagtttataattcatataaaatgccttttgtatttaaaataatcctattttaatcagtgcatgaaatttgcttttttaaagttcatttgaatgattattccttccctctaaagaaatgattttggtaatgttgagaggtaccttaccacaaatcctaactgtaagtgtattcatggttattttcaaaagaattatgactcttccccaaaagaatcctaaaaaacttgtaataaacctataaagctgatttgcatatttacaaaattttgaatagcaaatataggcaactcatatatgtatataattttt

SEQ ID NO: 316 - DNA, 222 bp, Homo sapiens
aaactacagagggttttccagctattatttcctttagtttctaaaagtaacgacttatattaatgttttataaaagatagtgatgaaaaaaaggtaatgctgaaataaaggcgcttttagaaatatttaaggacaacataaggtattaatattggaaaaaaactgtacatattttcaagcacaacactgaaatattgcagcagtgtttaactgaattgtttt

SEQ ID NO: 317 - DNA, 490 bp, Homo sapiens
ccttgaatgagcgtggagagcgattaggccgagcagaggagaagacagaagacctgaagaacagcgcccagcagtttgcagaaactgcgcacaagcttgccatgaagcacaaatgttgagaaactgcctatcctggtgactcttcttaagagaaactgaagagtttgttcagcagtttttacaagaattcgggacctccgcttgcttctttttttccaatatttggacacttagagtggtttttgttttttcttttcagatgttaatgtgaaagaaagggtgttgcatttttacatttccctaatgatcttgctaataaatgctacaatagcatcggcttcattttgggtttttgcctcctcccactgtgtgtatgtgtgtatatgtatgttttgaatatgttttctttattaaaaaatattttttgtagtttgaatatgaaatttggaccaaatgataaactgcgctgagtctaaactggcaacatgta

SEQ ID NO: 318 - DNA, 340 bp, Homo sapiens
cctggagtccaataaccaccccctcataccacaccctgtgcatacaccagccaagcctttcctggtctgggaagggaagagaaaaaagacgcaggccacctgggggttctgcagtctttggtcagtccagctttctatcttagctgcctttggcttccgcagtgtaaaccttgcctgcccggaggcaggaggcccagctggacctccgagggccatgagcaggcagcagccatcttggcctcaagcttgcctttcccttgagtccctctctcccctcggctctagccagaggtgtagcctgcagatctaggaagagaagagctggggaggaggatgaagg

SEQ ID NO: 319 - DNA, 373 bp, Homo sapiens
aaagatgctgttaatgaacattacggacaattcatggtgtggctagttggtaacacttcagctgatttttcttatgagatggaaaaaaaaatcagccaagtaagggcacatcttcagttcatttagaagtcagcatccaaggtaaaagaattctctgttggacttgacatcactcccatcctctgatactcgcctactctcttctcaaagaagttagtctttccttccagtgaaatattctccataaagtcaaatgggttctctactctgaaaaccttgctaaaacccagttccagcataagtctgtctgccacaaactcaatgtattgcttcattagagtgcaattcatgccaatgagcttcacaggcaagg

SEQ ID NO: 320 - DNA, 509 bp, Homo sapiens
aaaaacaaaattaaattttcatttcaattaagaccccttttggcattttgcttacttattctgccctttggttaacagcatcagcatcacattactattttatattgcatatatgtagcatttgcttccttaagttttcaacatatcatttatatttaaaggcagacactgagtcagtattaatagattaactaaactgcactgtaatttagataaaattactgtgtctcactgtgtattacatgcaaaatccacataaattgtcatttaaccaacagtactgcacgagcgaacatctcgatatatgaaaactgcatcatcaattcaacgttttggtacttgaaactgcatcataaatgcaacattgtcatatgtgaaaacgacaccctaagtccttctttttaaaaatgacattgcgtttagcttattgtaagaggttgaacttttgtattttgtaactatctttaagctcttcagtttataattcatataaaatgccttttgtattt

SEQ ID NO: 321 - DNA, 617 bp, Homo sapiens
ccaaggccccttttgcagcccacggctatggtgccttcctgactctcagtatcctcgaccgatactacacaccgactatctcacgtgagagggcagtggaactccttaggaaatgtctggaggagctccagaaacgcttcatcctgaatctgccaaccttcagtgttcgaatcattgacaaaaatggcatccatgacctggataacatttccttccccaaacagggctcctaacatcatgtcctccctcccacttgccagggaacttttttttgatgggctcctttatttttttctactcttttcaggcgcactcttgataaatggttaattcagaataaaggtgactatggatataattgagccctctggtccaggtctcagtttacctaatattacctcagaaaggatatggagggaagatgatctttttgccaggtctgacttttcttcctgctccgccctccattaacgctcagtaccctttagcagctgacggccccacgttctactccatgcttggcttcctttccaactagctctttcatatattttacttgctagtatctccattctctctaaagtagtggttctttttgcccttaaacttaaattttt

SEQ ID NO: 322 - DNA, 403 bp, Homo sapiens; identical to SEQ ID NO: 293

SEQ ID NO: 323 - DNA, 298 bp, Homo sapiens
ccagaattagggaatcagaatcaaaccagtgtaaggcagtgctggctgccattgcctggtcacattgaaattggtggcttcattctagatgtagcttgtgcagatgtagcaggaaaataggaaaacctaccatctcagtgagcaccagctgcctcccaaaggaggggcagccgtgcttatatttttatggttacaatggcacaaaattattatcaacctaactaaaacattccttttctcttttttcctgaattatcatggagttttctaattctctcttttggaatgtagatttttt

SEQ ID NO: 324 - DNA, 78 bp, Homo sapiens
ccatgggaaggtttaccagtagaatccttgctaggttgatgtgggccatacattcctttaataaaccattgtgtacat

SEQ ID NO: 325 - DNA, 174 bp, Homo sapiens
ccatcatggtcaggaactccgggaagtcaatggtcccgttcccatctgcatccacctcattgatcatatcctgcagctctgcttcagtggggttctgtcccagggatctcatcactgtccccaactccttggtggtgatagtgccatctccatccttgtcaaagagggagaagg

SEQ ID NO: 326 - DNA, 679 bp, Homo sapiens
  misc_feature 83, 606: n = A,T,C or G
aaaactgaaatacctcttaaaataatttgatccccagcgtttgctctttttgaagtaaccaacttactcttaaaaaggatggntgccaagatggaaagtcttactgggttttcatgttaacctattctttggacataactatgaattttgtatacaatgcacttcatgaaaagttgtggctcccccagattgcccacaagtgtgatcttgaagtcctaaacatttgtccatgtaagcttcaaaacagcgttaactgagttattcaagtagcagtacttaaagatacaattcttgaagcagtttcaatggtttctgatccaaataatcagtttctgaacattactacttcacataatagagtccatcttcagtttcttctcactttctctttcccttttgggtttcctttttgtggcctgaggccaccagttctttgggtactatcaagatacttccatcatgggtacactggagagcatagtggttgggattgactggcctaccttggtcatctcttaatctactaaaaatatcatgataaaggtcatgcagtttctgtttcattatgttaatagctttggtacattgtgcttgctctctcttaanagtttccttctttgcttgcaagttacatacatcatcttctaaattcaaaattatgtccattttggcgtttacc

SEQ ID NO: 327 - DNA, 619 bp, Homo sapiens
  misc_feature 137, 490, 493: n = A,T,C or G
aaaataagttactggtaaatggagttgcattctatagtcacttaataaatattaacaaaatatttataactggaaccttaatgaaatgtatcatcaaatcaggtaaaagcaacttgtccgcagttaccaaagcctanatacgcgttagatgcgccttttccggcctgtgcgtctgctctggttcctctcaggcagcaaagctggggaaggaagctcaggcaggagcctccccgacgccacaacggcacaagcagcagctaaagcaccgcactttgctctactaaccttttacttaaatgaggttttgccaaatccacatctggaaccgcgtcacacccatttgcaaggatgtttgttctttgatgaaactgcatctctactgcacatgagggctttcattgtaggacaagaggagagttcgtttatttttgtaactgttttacatgttccgattagttaatcggtagcttatgtcatttgctatgcctgnagncttctaatctctccttactaaaacattacttcaaatttgaattgacccttggttataatttatttagccgggatttgtgtgtcattgtagagcaactctaattcaagaatagtgacaacttttaag

SEQ ID NO: 328 - DNA, 132 bp, Homo sapiens
aaatccaaatacaaaagcatagtctctgcaagattttgttctttgaatttcttgatattgtaattgattattgataactgtcatcatgaaattatctctcaataataagataaataaactagcatatgaatc

SEQ ID NO: 329 - DNA, 854 bp, Homo sapiens
  misc_feature 801, 840, 841, 849: n = A,T,C or G
ccttgaggtaactattgcaaaatatacagtgtaagttcagtctgatggaaaccccagattcatcaaggatacaaatctacagtagcccaatggcggtttcatagtgtataatttattatcaataaaattaactccgttacaatcagcattcatttcctccaattaaaattaagcataaaccctaggtagtaaccttctgcacatatgtatagctccgaatttcctcactgttcgtctggtgcaaaaacaatattcaagcttgtctgattatgcatattttctttaatcatatagattatatatacaatagacaagacaggactatatagataatggacagacttaaatgcccgcatttttaaggtggagaaaatgatgaatctatgcatccccgagaacacttaaaatttttttttatttcactgggaaattcttacagctactttacaatcataggttaacagcctagttatacagaagacatattccactacagagctatactctatgcaactgttttttcccctcataaacaacctgagttcaaattgaattctatcttccacaatcacaatgggtgcatcacccagtacacagaagtttgaatcacaaaacataattaccacaataaaacacagtgttcaagtatcttggcagagcaatctgccgcacaaactgcaaattaaattaactacacagactaaaaactatacagcctaccatcacagttgtgcattataaaaaagggagtttctttcctttggttttaagtcaggaacagggtaggattttttaccctcnggccggggaccacgctaaaggggcgaaatttcttgccannatattccnttcac

SEQ ID NO: 330 - DNA, 299 bp, Homo sapiens
ccaatgaataactgactttataatcctgggcaatcagcttttggcgggttgtaagtgcttctcgacacttttcactcatggattcttcaaatttatggttaaagaggcacttatacactctgccctcaccagcttgtgtattttcacaaaaacgctcccgatcatctcggcaagcaaaatataaatgccggtctaagtgaaagtcatccgatgacagctcagccacccggagaatggctttcttgcagagttcagaaacttgaatcttgggttctctttcttctgcttctttcaccagg

SEQ ID NO: 331 - DNA, 573 bp, Homo sapiens
aaagatatgaacagcttaattttccgtgtgattatctaattaaaaaagaaaaacaaaacaagcaaaatgttcaagttaaaaaaaaaacataccgggtgagcaatgcactaaaattatccacatgaaaacaaatggtctgtaatcttataaaccaacatagcatttcactgtcaacaatgtgaaaatttaatatcttctcaaacaggcataagatgaagaagtgctattttttaattgtaaaaggaacttatgtaatgtaaaattacattataatttttcattccgaattgacaaatgatttcaaaaacaaggatcaaagtttgactgcaaatagtaatgcaatataatttcataaaaatccttcaatttctatttttttccttttctgtagttgacatatgaagaccacttcaatttctaaaaaagggaaccattccaattttccctccccaagaaaatgtctcacaattacaaagtagaaaaacagccgttcataaatgcaaaaaaattctgatttatatatgaaataatttctagatcaattcaacatatttgatgacatttgttgagttt

SEQ ID NO: 332 - DNA, 555 bp, Homo sapiens
aaatttgaaagttgtaagcactgatgttaatgtgattgatcagcatgggcatatgtaaaatgtccttttctggttgcctctctatgctattgtgttcagatacttacaccataattaaacagtaagttatagacttgctgagtttggcatagatagtgcgctcatttaatctgtgcctctcaaaacttcagaatattagcatattaccacaaataatttttggtgaaactattgagatattaaaatttttgaaatcactactgttacctgttatagaaaatagtgttggcttagtctagtctctgtgtaactggttacattttgatggttgtctatactcaactggatatgtgtatgtaaattagaaaatacatacctatccagacataaatgctaagtaacatttttttcttcctccaactacataatttgtagctcatcatttttccttaatcctttcctaacttgtcgcagcagtttgaatttcccagatatttatgtttgaacataatggctcagaatacatatttgaacatcatagttgtatatattttt

SEQ ID NO: 333 - DNA, 460 bp, Homo sapiens
aaatttctttcaacagtctattggggtccaaaaagcatatatcaaaacaaaaataacaaaagcaaaacaaaatgctacatgtaaaagctaaagaaagaaaatgcagcatattcaggttctttttcttgaggtacctatataaatttaatcacctgccccaaagtcctctcgttaggttaaaaacacaatgcgtcctggggagccaattgcccggcacgtcttattactgagaaagtgcaagaatgctgatcatcttatgcagcatactaaaggatgatttactctttacaaaatagagcttaagtatcaacctgatggaagttagaaaattaaaaacatttaagtagaatcatctctctctctatttttgagatcctgcagcaaaaagcctcccaaatcaactttcaaagttctgccattaaggaatgttggttctcttgtaaaattcagagatctcttt

SEQ ID NO: 334 - DNA, 190 bp, Homo sapiens
ccaaggaaggctgtgctctagcccatctgaccctgtctgcaaaccacctgggggacaaggctgatagagacctgtgcagatgtctctctctgtgcccctcactcatctcactggatctgtctgccaaccctgagatcagctgtgccagcttggaagagctcctgtccaccctccaaaagcggccccaagg

SEQ ID NO: 335 - DNA, 394 bp, Homo sapiens
aaatttggacagacttctagcggacagttacttctcaagaattttctatacaaaagctgtgccaggcatatattttctcaccaggacacatggggcagcggacccctggtgtcagtaagaacacacccagaatgatataaccagatatttttcagtttctaaattaaggcatattcaaaaaattccatgtacaagtttacaccacttttctaagttactcaccaggtaattaaagcagattcacagatgaattactctcagtttaactatatgcaacaaccatgccaataacttttcttctaaattttgcataataatggttaaaaaaagtggtagtttaactatcatgttcacaattgtcatttttcaaggcagtagaagaccaagacatttt

SEQ ID NO: 336 - DNA, 429 bp, Homo sapiens
aaaagctatcaccattgtagtagaatcatccttcttttttgaaatttgaagcatcccaggcttaaaatcttgtgtttcagaaagacagtttataccatgactgcttaattatccccccaaagaccttctgattgaagtcatgtacagttcagtggcctaaattctctgcctttttaacttgctttgcaagcctactctgaaaataagttatttagtcaagttattctcaaagatgtcccagttgcctagaaaggatcaaatggaacatttgacacacatactcaaaaaaatgtaactgactataaacactttaacctaatcatctgtatcaaactttctaaaaatcaaatctcaggattgttccactttagagattctatgtaaagtttatataactatacttgtcaaatagcacctatctatgcattt

SEQ ID NO: 337 - DNA, 373 bp, Homo sapiens
aaagatgctgttaatgaacattacggacaattcatggtgtggctagttggtaacacttcagctgatttttcttatgagatggaaaaaaaaatcagccaagtaagggcacatcttcagttcatttagaagtcagcatccaaggtaaaagaattctctgttggacttgacatcactcccatcctctgatactcgcctactctcttctcaaagaagttagtctttccttccagtgaaatattctccataaagtcaaatgggttctctactctgaaaaccttgctaaaacccagttccagcataagtctgtctgccacaaactcaatgtattgcttcatcagagtgcaattcatcccaatgagtttcacaggcaagg

SEQ ID NO: 338 - DNA, 366 bp, Homo sapiens
ccatccccttatgagcgggcgcagtgattataggctttcgctctaagattaaaaatgccctagcccacttcttaccacaaggcacacctacaccccttatccccatactagttattatcgaaaccatcagcctactcattcaaccaatagccctggccgtacgcctaaccgctaacattactgcaggccacctactcatgcacctaattggaagcgccaccctagcaatatcaaccattaaccttccctctacacttatcatcttcacaattctaattctactgactatcctagaaatcgctgtcgccttaatccaagcctacgttttcacacttctagtaagcctctacctgcacgacaacacat

SEQ ID NO: 339 - DNA, 319 bp, Homo sapiens
ccttccctccccaccaccatcaacctcttcaaaacctactccctccctctaagtatctctcaacacagtatgtctggggctagatttcaaaacccacgtaatgaaaaagtcagttttacaagcctaattttgttgtttttttttttatatcaattaacgttaaaaattgcatcaactatttaattcatgaggatctttcatattaaaatttaaccttaagattcaaccgccatgtgcttttataaaggaaacattttttagagacgtctgagctcacttttacatggtggtgcctactgccgttaatgtttgtgatttt

SEQ ID NO: 340 - DNA, 278 bp, Homo sapiens
  misc_feature 30, 31, 44, 58, 70, 71, 106, 140, 148, 156, 164, 171, 174,180, 187, 190, 196, 219: n = A,T,C or G
ctaataaaatgaattaaccactcattcatnnatctacccacccnatccaacatctccncatgatgaaacnncggctcactccttggcgcctgcctgatcctccaantcaccacaggactattcctagccatgcactactnaccagacncctcaacngccttttnatcaatnggncacatnactcganacntaaatnatggctgaatcatccgctacctncacgccaatggcagcctcaatattctttatgctgcctcttcctacacatgcgggcgagg

SEQ ID NO: 341 - DNA, 400 bp, Homo sapiens
ccagcatggggctgcagctgaacctcacctatgagaggaaggacaacacgacggtgacaaggcttctcaacatcaaccccaacaagacctcggccagcgggagctgcggcgcccacctggtgactctggagctgcacagcgagggcaccaccgtcctgctcttccagttcgggatgaatgcaagttctagccggtttttcctacaaggaattcagttgaatacaattcttcctgacgccagagaccctgcctttaaagctgccaacggctccctgcgagcgctgcaggccacagtcggcaattcctacaagtgcaacgcggaggagcacgtccgtgtcacgaaggcgttttcagtcaatatattcaaagtgtgggtccaggctttcaaggtggaaggtgg

SEQ ID NO: 342 - DNA, 536 bp, Homo sapiens
aaagaacaatgggaaaaacaagtccgtgttctcacagatgctgtcgatgacattacttccattgatgacttcttggctgtctcagagaatcacattttggaagatgtgaacaaatgtgtcattgctctccaagagaaggatgtggatggcctggaccgcacagctggtgcaattcgaggccgggcagcccgggtcattcacgtagtcacctcagagatggacaactatgagccaggagtctacacagagaaggttctggaagccactaagctgctctccaacacagtcatgccacgttttactgagcaagtagaagcagccgtggaagccctcagctcggaccctgcccagcccatggatgagaatgagtttatcgatgcttcccgcctggtatatgatggcatccgggacatcaggaaagcagtgctgatgataaggacccctgaggagttggatgactctgactttgagacagaagattttgatgtcagaagcaggacgagcgtccagacagaagacgatcagctgatagctgg

SEQ ID NO: 343 - DNA, 646 bp, Homo sapiens
aaaacttctattcatcaaaagacataaagaaaacagtcaagccacagactaggtgtaatatctcaatacatatatccgacaagagaattgcatctagaatgtataaagaatttctatgacccaattatagctatcagggatatacaaattaaaaccaaaatgaaacatcactacacaccgattggaatggttaaaaaggaaaaatactgacaacaccaatatttgtaaagacaggaggtaccagaactctcattcattatattcataaattgacaaatataaaaactgctatagtagggcagtcttccttagaaagggattgtgggcatgacagagaacaatattaatctgtccattatattccttaactgtaaaatggagaccatatgttccaccagcttcacttggtaattatgatacatggctattaagagactcaaatgactccatttcatcaactaatatgccctgtcaattctacttctaaagtatcccatgttctatccaatgtcataccactatcataatttaagtgttcataactctctataatatttcaataatctaactggtctcaatgcctgtagtagaaattgcagattgggctccccaatttctgttccctaggaaggctgagaaagctttt

SEQ ID NO: 344 - DNA, 383 bp, Homo sapiens
cctgcaccccagtataagggcctccccagctgagtaagaagctgcttcccctcctctcataggccaagcctattgtgtgaaaccatctcatggtcttggtgacgtagaccatttttgaaaccgtctcatggtcttggtgacgtagaccgtttgcttctttaactccagccgcggaatgacattagtggaaccgggctagggaactgctggaagttcaggatgccaccaccttgaacacctaggccagggatccccaccatgtcccgggtttctttcttcgagagtatagaaccgttcattcttgctttgtgtcccattccatctcttgaaaaaatgtagtctttgaatgtgtgaaaatctagggacattcaatctagtctttt

SEQ ID NO: 345 - DNA, 263 bp, Homo sapiens
cctccccttcccctttgctggtgggaggagctcgtgtgctccttggccgcttactggaagggcgtttttcagagctgcagggacagggtgagcagctgaagggctaggagggaagccggcccccgctctgcagaagctgcatttcagctgaatctgtgtttcagcctcagttggttgcaccgttagcccctctcctcccggatggtcatgtttttgtcacattagagaataaacagccacacacacatttttttttttccttt

SEQ ID NO: 346 - DNA, 132 bp, Homo sapiens; identical to SEQ ID NO: 328

SEQ ID NO: 347 - DNA, 564 bp, Homo sapiens
  misc_feature 484: n = A,T,C or G
cctgggtatccagggaggctctgcagccctgctgaagggccctaactagagttctagagtttctgattctgtttctcagtagtccttttagaggcttgctatacttggtctgcttcaaggaggtcgaccttctaatgtatgaagaatgggatgcatttgatctcaagaccaaagacagatgtcagtgggctgctctggccctggtgtgcacggctgtggcagctgttgatgccagtgtcctctaactcatgctgtccttgtgattaaacacctctatctcccttgggaataagcacatacaggcttaagctctaagatagataggtgtttgtccttttaccatcgagctacttcccataataaccactttgcatccaacactcttcacccacctcccatacgcaaggggatgtggatacttggcccaaagtaactggtggtaggaatcttagaaacaagaccacttatactgtctgtctgaggnagaagataacagcagcatctcgaccagcctctgccttaaaggaaatctttattaatcacgtatggttcacaagataattc

SEQ ID NO: 348 - DNA, 321 bp, Homo sapiens
  misc_feature 3, 12, 23, 70, 80, 89, 101, 123, 131, 151, 168, 177, 185,212, 220, 222, 233, 253, 255, 263, 264, 286, 287, 300, 302,315: n = A,T,C or G
gcncatgaacanggagcaacganaagagatgtcgggctaagggcccgggacgggcggcacccatcctgcnacggaacacnttcgggttntggttttgattngttcacctctgtttatatgcanctatttgntcctcctcccccaccccagnccccaacttcatgcttntcttccgcnctcagccnccctgccctgtcctcgcggtgagtcantgaccacngnttcccctgcangagccgccgggcgtgagacncngaccctcnntgcatacaccaggccgggcccnngctggctcccccngnggccctgtgaaanagctgg

SEQ ID NO: 349 - DNA, 255 bp, Homo sapiens
ccatgacagtgaaggggctgttaggaatatcaacaccaccgaagcgcacatagatcacatatgtgcccggcttggcagctgtgtagaagatgtcataggttccatcttcattctcaatgacatcggcctcggcctcagtgccatctggggtcagaaccgtgcaggtcactttacccttcccggcagtcttggcatcaaccacaaagcctacttcttcgccagttttcacagtggaggcgattccaggacccgtag

SEQ ID NO: 350 - DNA, 496 bp, Homo sapiens
  misc_feature 10, 27, 96, 110, 112, 309, 360, 447, 455: n = A,T,C or G
gggcttattngctcacaaaatcattcncttttggaactatggccaattgaagctacacactgaatttattaatacagcattaagtttctttgtgtnaaaaaatctttgtncncagtaataaaaaaagataaggcaagatgcattaaacatgaaaccttctggctcttttcctctgcgtttttacagagccactgatgactatctgcaacaaaagagttaagtttctgattttccgtatcaagcatcttatgcctttgctgtggtaagaattctggccaagcaccctgaaggacagatgctggtgatggnctttggcacttatgctggcaaactgagcttctttcccttgagtacttttgnaatgtacaagtagaagaagtcacaagtataggatggtctggactacgccggccaccacagcaatgaggtcaaagaagccctcaaagnagaagcgnccagatccagttgacaagatacaaagcacgatagaggccca

SEQ ID NO: 351 - DNA, 109 bp, Homo sapiens
  misc_feature 49: n = A,T,C or G
ccatagtgaagcctgggaatgagtgttactgcagcatctgggctgccanccacagggaagggccaagccccatgtagccccagtcatcctgcccagccccgcctcctgg

SEQ ID NO: 352 - DNA, 384 bp, Homo sapiens
ccttcgagagtgacctggctgcccaccaggaccgtgtggagcagattgccgccatcgcacaggagctcaatgagctggactattatgactcacccagtgtcaacgcccgttgccaaaagatctgtgaccagtgggacaatctgggggccctaactcagaagcgaagggaagctctggagcggaccgagaaactgctggagaccattgaccagctgtacttggagtatgccaagcgggctgcacccttcaacaactggatggagggggccatggaggacctgcaggacaccttcattgtgcacaccattgaggagatccagggactgaccacagcccatgagcagttcaaggccaccctccctgatgccgacaaggagcgcctgg

SEQ ID NO: 353 - DNA, 345 bp, Homo sapiens
  misc_feature 19, 41, 59, 110, 124, 131, 230, 231, 239, 245, 247, 273,280, 284, 285, 296, 303, 325, 343: n = A,T,C or G
ccttggtcaggatgaagtnggctgacacaccttagcttggntttgcttattcaaaaganaaaataactacacatggaaatgaaactagctgaagccttttcttgttttancaactgaaaattgnacttggncacttttgtgcttgaggaggcccattttctgcctggcagggggcaggtatgtgccctcccgctgactcctgctgtgtcctgaggtgcatttcctgttgnncacacaanggccangntccattctccctcccttttcaccagngccacancctnntctggaaaaangaccagnggtcccggaggaacccatttgngctctgcttggacagcanag

SEQ ID NO: 354 - DNA, 712 bp, Homo sapiens
ccatctacaatagcatcaatggtgccatcacccagttctcttgcaacatctcccacctcagcagcctgatcgctcagctagaagagaagcagcagcagcccaccagggagctcctgcaggacattggggacacattgagcagggctgaaagaatcaggattcctgaaccttggatcacacctccagatttgcaagagaaaatccacatttttgcccaaaaatgtctatttttgacggagagtctaaagcagttcacagaaaaaatgcagtcagatatggagaaaatccaagaattaagagaggctcagttatactcagtggacgtgactctggacccagacacggcctaccccagcctgatcctctctgataatctgcggcaagtgcggtacagttacctccaacaggacctgcctgacaaccccgagaggttcaatctgtttccctgtgtcttgggctctccatgcttcatcgccgggagacattattgggaggtagaggtgggagataaagccaagtggaccataggtgtctgtgaagactcagtgtgcagaaaaggtggagtaacctcagccccccagaatggattctgggcagtgtctttgtggtatgggaaagaatattgggctcttacctcccaatgactgccctacccctgcggaccccgctccagcgggtgggggattttcttggactatgatgctgggggagg

SEQ ID NO: 355 - DNA, 385 bp, Homo sapiens
cctcatagccgcttagcacagttacagaatgtctgaaggggacagtgtgggagaatccgtccatgggaaaccttcggtggtgtacagatttttcacaagacttggacagatttatcagtcctggctagacaagtccacaccctacacggctgtgcgatgggtcgtgacactgggcctgagctttgtctacatgattcgagtttacctgctgcagggttggtacattgtgacctatgccttggggatctaccatctaaatcttttcatagcttttctttctcccaaagtggatccttccttaatggaagactcagatgacggtccttcgctacccaccaaacagaacgaggaattccgccccttcattcgaaggctcccagagttt

SEQ ID NO: 356 - DNA, 347 bp, Homo sapiens
aaatgagataaagaaagtctccttttgtttttagatggaaaagaaagcacaagttttttctacctgtgaatgaactttggtgacctatatgtgccattcatgcagcatttttgttcatattggcttagaattcagtgcatgaatatcattacattcttatatctaacattcctagttagctttgattcaaaatatacaaaatctgatacatgaatactttgctagattaatgacttgatcatctttggaatgagtaggcaagacgatttttacctattatttctatgttgtgggtaatgttaaaactaaatacagatgataataattgctatttcacagtgatgttt

SEQ ID NO: 357 - DNA, 313 bp, Homo sapiens
aaagtaatcaacctctctgtccttccattagtctggatcgtctaaagattgttttatttttagaggctcatccggtcagatgttagtgatgtgaaatttcaggccaggcgtgacgtcagcgtggcatttgaaacagctccatgttgcccttagtgctgtctgaccgaagcctgtctgtcctcagatataaagatgaagcgcagctgtataaagaagagcacctgaggaatcggcagcaccctcactgctacgttcagtacatgatcgccatcatcaacaactgccagaccttcaaggaatccatagtcagttt

SEQ ID NO: 358 - DNA, 403 bp, Homo sapiens; identical to SEQ ID NO: 293

SEQ ID NO: 359 - DNA, 411 bp, Homo sapiens
aaataaatacttagaacacgacttggctcctacaagcatctggactctaggtctcagtactggagtgtctcacccatgggccccacgcagggacgccacggttccctcccaccccgtgatcaagacacggaatcggctgccgatggttggatcgcaatgcgccccttttctagagccttccccggccatctacaggcaggatgcggctgggaaaaagacaactggaatttctcgaaggttgatggtccgcacggttgaggattctacgtggttctcttggttcccctggtgtgtgtgtgtgtggaggaggccgcggcccttagatcaccttcttgagctcgtcgtacaggaccagcacgaaggcgccccccatgccccgcaggacgttggaccacgcacccttgaagaagg

SEQ ID NO: 360 - DNA, 378 bp, Homo sapiens
  misc_feature 276, 328: n = A,T,C or G
cctcttcaggggcccgagccagggacagggccttggtttccttctccctggcttctgcctcagctctgtccctctcatccgcgtatttggaagagatgtttttctcctcggctaacaactgatcaaatttcctctgcttcttttccaggttggacacgagttgccgctggttgtccaaatcaacaaccaggtcgtccagctcctgctgaagcctgttcttggtcttttccagtttatcataagcggccgccttctcctcgtactgctgggtgaggntctcgatctccttctggaacctcttcttcccctcttccagagcttccacggngctggcaaagtcctgcagcttcttcttcgagtcggagagctggatgttga

SEQ ID NO: 361 - DNA, 372 bp, Homo sapiens
aaatactgggggccattaagagtggatgtagctaagagcttagctaacattgccttttcactctatttttctcagatattgtaagcattctgtttttcaatattgtagttaattttttggctttcaacagcagccctagtaatggtggagttgttaattaatgtgtatattgtactgaatttctgtcagttaaggggttcactgctttggtggaaattggtggaaattgctagcaggttccacgatgtttatttttttctccatgttgtatatcattaccatttcacatacgcgtttctatttttcttcctctcctcctgatctccttaaaaatgaatctagagttggtggctttttccccctcctctttgg

SEQ ID NO: 362 - DNA, 544 bp, Homo sapiens
cctgagtcacctagcatagggttgcagcaagccctggattcagagtgttaaacagaggcttgccctcttcaggacaacagttccaattccaaggagcctacctgaggtccctactctcactggggtccccaggatgaaaacgacaatgtgcctttttattattatttatttggtggtcctgtgttatttaagagatcaaatgtataaccacctagctcttttcacctgacttagtaataactcatactaactggtttggatgcctgggttgtgacttctactgaccgctagataaacgtgtgcctgtcccccaggtggtgggaataatttacaatctgtccaaccagaaaagaatgtgtgtgtttgagcagcattgacacatatctactttgataagagacttcctgattctctaggtcggttcgtggttatcccattgtggaaattcatcttgaatcccattgtcctatagtcctagcaataagagaaatttcctcaagtttccatgtgcggttctcctagctgcagcaatactttgacattt

SEQ ID NO: 363 - DNA, 328 bp, Homo sapiens
aaactggttatgacaaaagcctttagttgtgtttcttgaactataaagaaaacaaattttggcagtctttaagtatatatagcttaaaatataatttttagcatttggcaccatatgtatgccattatatttgattttgcattactgtttcacaatgaagctttctttaaggctttgatttttatgattatgaaagaaataaggcacaaccacagtttttctttcttaaatttcatcactgttgatgtggttcttttgtgttaaaaaaaaaaagtgcaactatcaaaactaaaaaattatagagtaatattgccgttctgctgatttt

SEQ ID NO: 364 - DNA, 569 bp, Homo sapiens
cctgggcacctctttgcttgaaatatggcaagacttggaaaaatgtttgcccttagaatctatctcactactttagttagttgtctcctttgggcctgggcacagttctggccctgatctggaacagactcccttttctaaaactgaacttgaccacatcaaaagtttgtaaaacaatctccatggtaattaaacttgcattcaacaccatatggtaacagaagatggcaaaggataagattcagatcttagatctttccaagtagggcatgttagatgatagaaggattagttgcaagctggatctgagctcaggcttgggcatgaaggaaactgtctcccatgtggtttggaagagttaggggctccctgagctctattgtgaactatacgggtttcatccaaggaatggtatgatgtgggcataaaaccattcttcagacaactgaagatggtccccttctgtagccagaaacactagctgtcctgcattgtccatttcctttagccccaggcggtcctgtgtgtacagggaggtctcctgtaagggaatggtttccttggcttgg

SEQ ID NO: 365 - DNA, 151 bp, Homo sapiens
aaaaaaaaaaatccttttattatggaatttgtcaaacacacacacaagcataacaaacccctaggtacccatctccaagttttgacccctattataatttcatcttcagtgttttattatccacttcctctctctctatctttagtatttt

SEQ ID NO: 366 - DNA, 508 bp, Homo sapiens
  misc_feature 43, 99, 132, 136, 138, 142, 180, 204, 208, 228, 233, 249,293, 307, 309, 347, 358, 374, 401, 434, 436, 440, 442, 463: n = A,T,C or G
agtataaagatatattccataaaagagtttggcagtcaaaganaagcatcgcacttccgaaaaacacaagcattcttctcctagtctacagagaattgngtaaaaaaaaaaaaaaatcatcatcaacagccnccantntacnccacactagaatgtacactccggcaagtaaattaaggntgcagtccatccctgaacgatganaagnggtctgagctatggcaaagngttanaaagtagcccagctanacaaatgccccagctatccccaggggagttattcagtacttaanacttcatttccaanancagccccggaaaagccctgacaggaaggggggaccagngatcaccgatntcccattaggggcggncaccaaaaacaaaatgcctggagcttntgagcagctgcagcctggggttgtggctaggcncngggngnggttgcaaaaaaacggctgtntccggggagaggcaaatggcaggccagccagccctgggtacatgg

SEQ ID NO: 367 - DNA, 382 bp, Homo sapiens
cctgagcggctagtctttaagatgcgcttctatcgtttgctgcaaatccgagcagaagccctcctggcggcaggcagccatgtgatcattctgggtgacctgaatacagcccaccgccccattgaccactgggatgcagtcaacctggaatgctttgaagaggacccagggcgcaagtggatggacagcttgctcagtaacttggggtgccagtctgcctctcatgtagggcccttcatcgatagctaccgctgcttccaaccaaagcaggagggggccttcacctgctggtcagcagtcactggcgcccgccatctcaactatggctcccggcttgactatgtgctgggggacaggaccctggtcatagacacctttcagg

SEQ ID NO: 368 - DNA, 174 bp, Homo sapiens
ccttctccctctttgacaaggatggagatggcactatcaccaccaaggagttggggacagtgatgagatccctgggacagaaccccactgaagcagagctgcaggatatgatcaatgaggtggatgcagatgggaacgggaccattgacttcccggagttcctgaccatgatgg

SEQ ID NO: 369 - DNA, 216 bp, Homo sapiens
aaatctcatgggttctattaaaaaaatatatatatagggccccaatccattgccatcaaattgcccttggacttttccaaggtatattatggggttttatgcaaaattccaagctaccatgtaactttttttaaccatttaacaaggagggggaactgtttcctaccttctttacatgttgtgcattgttgtggtccagaaatgccaaaccttttt

SEQ ID NO: 370 - DNA, 344 bp, Homo sapiens
ccttggtcaggatgaagttggctgacacagcttagcttggttttgcttattcaaaagagaaaataactacacatggaaatgaaactagctgaagccttttcttgttttagcaactgaaaattgtacttggtcacttttgtgcttgaggaggcccattttctgcctggcagggggcaggtctgtgccctcccgctgactcctgctgtgtcctgaggtgcatttcctgttgtacacacaagggccaggctccattctccctccctttccaccagtgccacagcctcgtctggaaaaaggaccaggggtcccggaggaacccatttgtgctctgcttggacagcagg

SEQ ID NO: 371 - DNA, 741 bp, Homo sapiens
  misc_feature 644, 646, 689: n = A,T,C or G
aaattacatatctaattgtgtgatttgttaaatgcccatttcttcatctaagtgctaagtgctaagtgtagcagtttgttccctgctacactccaaggcacaaaggagttcaaggaatgtgcaatggaaatcagttagatgaatgtgttaggaaccttccctttaataaagctggatcccacactagcccctacaccctctcatcaccaaatattcctgcttcctctcacctgcacttgctgttctctcctctgccacacaaatctacctctcaagcctaggtcccacctgcttcatgacaactttccagactattccagaacctttaaccatctctgacctctcatcagatctatgttgtacataacaccaattaatgagatcattactgctttatgctctaattgcttcctgtattcaaaatcttctctccaaccacataatgactccctaaacttctcttgtattttccaatgccttgtacaagcacagaactggtcaatcaataaatactcactggttatttgaggaaaaaatgttgccaagcaccatctttatcagaaaataaatcaattcttctaaacttggagaaatcaccctattcctagtatgtgatcttaattagaacaattcagattgagaangngacagcatgctggcagtcctcagagccctcgcttgctctcggnacctccctgcctgggctcccactttggtggcatttgaggagcccttcagcct

SEQ ID NO: 372 - DNA, 218 bp, Homo sapiens
  misc_feature 57, 218: n = A,T,C or G
ccgccagtgtgctggaattcgcccttggccgcccgggcaggtaccacaacagcaggnctgagtgagaaatctaccaccttctacagtagccccagatcaccggacacaacactctcacctgccagcacgacaagctcaggcgtcagtgaagaatccaccacctcccacagccgaccaggctcaacgcacacaacagcattccctggcagtaccttggn

SEQ ID NO: 373 - DNA, 168 bp, Homo sapiens
actgctagggaatgctgttgtgtgcattgagcctggtcggctgtgggaggtggtggattcttcactgacgcctgagcttgtcgtgctggcaggtgagagtgttgtgtccggtgatctggggctactgtagaaggtggtagatttctcactcaggcctgctgttgtggt

SEQ ID NO: 374 - DNA, 154 bp, Homo sapiens
  misc_feature 25, 34: n = A,T,C or G
tgagaaatctaccaccttctacagngagccccanatcaccggacacaacactctcacctgccagcacgacaagctcaggcgtcagtgaagaatccaccacctcccacagccgaccaggctcaacgcacacaacagcattccctggcagtacctc

SEQ ID NO: 375 - DNA, 275 bp, Homo sapiens
actgccaggggacagtgctgtgtcagttgaacctgggctgctgtgggaagttgttgattcctgactggggcctgaggtggtggtgctggcaggtaacagtgttgtatccgttgagcctgggctgctgtgggaagttgtagaatgccgactgaggcctggcgtggtggtgctgtcagggaatgctgttgtgtgcgttgagcctggtcggctgtgggaggtggtggattcttcactgacgcctgagcttgtcgtgctggcaggtgagagtgttgtgg

SEQ ID NO: 376 - DNA, 191 bp, Homo sapiens
  misc_feature 173: n = A,T,C or G
actgccaggggacagtgctgtgtcagttgaacctgagctgctgtgggaagttgttgattcctgactggagcctgaggtggtggtgctggcaggtaacagtgttgtatccgttgagcctgggctgctgtgggaagttgtagaatgccgactgaggcctgccgtggtggtgctgntagggaatgctgctagcg

SEQ ID NO: 377 - DNA, 476 bp, Homo sapiens
ccgccagtgtgctggaattcgcccttggccgcccgggcaggtacatttccttgtagactctgttaatttcctgcagctcctggttggttctggagcagatgatctcaatgagagagtcctcgtcggttcccagccccttcatggaagcttttagctcagaagcgtcatactgagcaggtgtcttcaataggcccaaaatcaccgtctccaggtggccagataaggctgacttcagtgctgatgcaagttcctttttggtccttctctggtaggcgaaggcaatatcctgtctctgtgcattgctgcggttggtcaaaatgttgacaatggtgacctcatccacacctttggtcttgatggctgtttcaatgttcaaagcatcccgctcagcatcaaagttagtataggctttgacagacccatatgcacttgggggtgtagagtgatcaccctccaagccgagcttgcacaggatt

SEQ ID NO: 378 - DNA, 455 bp, Homo sapiens
  misc_feature 370: n = A,T,C or G
agtgtgctggaattcgcccttggccgcccgggcaggtacacatcccatcttcaaatttaaaatcatattgtcagttgtccaaagcagcttgaatttaaagtttgtgctataaaattgtgcaaatatgttaaggattgagacccaccaatgcactactgtaatatttcgcttcctaaatttcttccacctacagataatagacaacaagtctgagaaactaaggctaaccaaacttagatataaatcctaccaataaaatttttcagttttaagttttacagtttgatttaaaaacaaaacagaaacaaatttcaaaataaatcacatcttctcttaaaacttggcaaacccttccctaactgtccaagtntgagcatacactgccactggctttagatactccaattaaatgcactactctttcactggtctgaatgaagtatggtgaaacaagc

SEQ ID NO: 379 - DNA, 297 bp, Homo sapiens
  misc_feature 16, 289: n = A,T,C or G
agctcggatccctagnacggccgccagtgtgctggaattcgcccttagcggcggcccgggcaggtacaaagaatccttagacgccatactgagttttaagttccttaattcctaatttaaggcttctagtgaagcctcctcacagtaggcttcactaggcccacagtgcccctagacctctgacaatcccaccctagacagactttattgcaaaatgcgcctgaagaggcagatgattcccaagagaactcaccaaatcaagacaaatgtcctagatctctagtgtggnagaactat

SEQ ID NO: 380 - DNA, 144 bp, Homo sapiens
  misc_feature 72: n = A,T,C or G
actttgctgaaaattctttttcccagggtctataaaacattaatttgtttttatattttactatttttttgngtttttttgtttttaaatcaataagtaatctaggactagcattatgtttgctagacctggcatttgctcggc

SEQ ID NO: 381 - DNA, 424 bp, Homo sapiens
actcttgaatacaagtttctgataccactgcactgtctgagaatttccaaaactttaatgaactaactgacagcttcatgaaactgtccaccaagatcaagcagagaaaataattaatttcatgggactaaatgaactaatgaggataatattttcataattttttatttgaaattttgctgattctttaaatgtcttgtttcccagatttcaggaaactttttttcttttaagctatccacagcttacagcaatttgataaaatatacttttgtgaacaaaaattgagacatttacattttctccctatgtggtcgctccagacttgggaaactattcatgaatatttatattgtatggtaatatagttattgcacaagttcaataaaaatctgctctttgtataacagaatacatttgaaaa

SEQ ID NO: 382 - DNA, 408 bp, Homo sapiens
actcttgaatacaagtttctgataccactgcactgtctgagaatttccaaaactttaatgaactaactgacagcttcatgaaactgtccaccaagatcaagcagagaaaataattaatttcatgggactaaatgaactaatgaggataatattttcataattttttatttgaaattttgctgattctttaaatgtcttgtttcccagatttcaggaaactttttttcttttaagctatccacagcttacagcaatttgataaaatatacttttgtgaacaaaaattgagacatttacattttctccctatgtggtcgctccagacttgggaaactattcatgaatatttatattgtatggtaatatagttattgcacaagttcaataaaaatctgctctttgtatgac

SEQ ID NO: 383 - DNA, 455 bp, Homo sapiens
  misc_feature 70, 72, 73, 184, 185, 330: n = A,T,C or G
actcttgaatacaagtttctgataccactgcactgtctgagaatttccaaaactttaatgaactaactgncnncttcatgaaactgtccaccaagatcaagcagagaaaataattaatttcatgggactaaatgaactaatgaggataatattttcataattttttatttgaaattttgctgannctttaaatgtcttgtttcccagatttcaggaaactttttttcttttaagctatccacagcttatagcaatttgataaaatatacttttgtgaacaaaaattgagacatttacattttctccctatgtggtcgctccagacttggnaaactattcatgaatatttatattgtatggtaatatagttattgcacaagttcaataaaaatctgctctttgtataacagaatacatttgaaaacattggttatattaccaagactttgactaga

SEQ ID NO: 384 - DNA, 376 bp, Homo sapiens
  misc_feature 276, 357: n = A,T,C or G
actcttgaatacaaggttctgatatcactgcactgtctgagaatttccaaaactttaatgaactaactgacagcttcatgaaactgtccaccaagatcaagcagagaaaataattaatttcatgggactaaatgaactaatgaggataatattttcataattttttatttgaaattttgctgattctttaaatgtcttgtttcccagatttcaggaaacttttttttcttttaagctatccacagcttacagcaatttgataaaatatacttttgngaacaaaaattgagacatttacattttctccctatgtgggcgctccagacttgggaaactattcatgaatatttatattgnatgggaatatagcattgcc

SEQ ID NO: 385 - DNA, 422 bp, Homo sapiens
acctgtgggtttattacctatgggtttatatcctcaaatacgacattctagtcaaagtcttggtaatataaccaatgttttcaaatgtattctgtcatacaaagagcagatttttattgaacttgtgcaataactatattaccatacaatataaatattcatgaatagtttcccaagtctggagcgaccacatagggagaaaatgtaaatgtctcaatttttgttcacaaaagtatattttatcaaattgctgtaagctgtggatagcttaaaagaaaaaaagtttcctgaaatctgggaaacaagacatttaaagaatcagcaaaatttcaaataaaaaattatgaaaatattatcctcattagttcatttagtcccatgaaattaattattttctctgcttgatcttggtggacagtttc

SEQ ID NO: 386 - DNA, 313 bp, Homo sapiens
caagtaggtctacaagacgctacttcccctatcatagaagagcttatcacctttcatgatcacgccctcataatcattttccttatctgcttcctagtcctgtatgcccttttcctaacactcacaacaaaactaactaatactaacatctcagacgctcaggaaatagaaaccgtctgaactatcctgcccgccatcatcctagtcctcatcgccctcccatccctacgcatcctttacataacagacgaggtcaacgatccctcccttaccatcaaatcaattggccaccaatggtactgaacctacgagt

SEQ ID NO: 387 - DNA, 236 bp, Homo sapiens
cgccctcataatcattttccttatctgcttcctagtcctgtatgcccttttcctaacactcacaacaaaactaactaatactaacatctcagacgctcaggaaatagaaaccgtctgaactatcctgcccgccatcatcctagtcctcatcgccctcccatccctacgcatcctttacataacagacgaggtcaacgatccctcccttaccatcaaatcaattggccaccaatggt

SEQ ID NO: 388 - DNA, 195 bp, Homo sapiens
acgcccttttcctaacactcacaacaaaactaactaatactaacatctcagacgctcaggaaatagaaaccgtctgaactatcctgcccgccatcatcctagtcctcatcgccctcccatccctacgcatcctttacataacagacgaggtcaacgatccctcccttaccatcaaatcaattggccaccaatggt

SEQ ID NO: 389 - DNA, 183 bp, Homo sapiens
  misc_feature 31, 32, 60, 115: n = A,T,C or G
taacactcacaacaaaactaactaatactannatctcagacgctcaggaaatagaaaccncctgaactatcctgcccgccatcatcctagtcctcatcgccctcccatccctacncatcctttacataacagacgaggtcaacgatccctcccttaccatcaaatcaattggccaccaatggt

SEQ ID NO: 390 - DNA, 473 bp, Homo sapiens
acaaagcagcaactgcaatactcaaggttaaaacattagaaaagcatttgtgtgacaggtatattacagtattatcaaaatattacattttcagacttacttagcagataatcatccaccagagcttaaatctttaaattatttccatagtcttaaaaaatatgtaatgtcagaatgcatataaaaagaatgtaaaaggaaacctaaaatacaaatggaataatgtaacaaataaatatttgatttcagtaactgttaataatcagctcaacaccaccattctctctaaactcaatttaattcttataggaataatgaactgtcaaatgccatggcataattatttatttccaagctatcatcaatgattagaactaaaaaaaatttggcataaaaaaatcacaattcagcataaataaagctatttttagcttcaacactagctagcatctctaagaattgttgaaataagt

SEQ ID NO: 391 - DNA, 216 bp, Homo sapiens
  misc_feature 41, 42: n = A,T,C or G
atttgtattttaggtttccttttacattctttttatatgcnntctgacattacatattttttaagactatggaaataatttaaagatttaagctctggtggatgattatctgctaagtaagtctgaaaatgtaatattttgataatactgtaatatacctgtcacacaaatgcttttctaatgttttaaccttgagtattgcagttgctgctttgt

SEQ ID NO: 392 - DNA, 98 bp, Homo sapiens
acttatttcaacaattcttagagatgctagctagtgttgaagctaaaaatagctttatttatgctgaattgtgatttttttatgccaaatttttttaa

SEQ ID NO: 393 - DNA, 397 bp, Homo sapiens
tgccgatatactctagatgaagttttacattgttgagctattgctgttctcttgggaactgaactcactttcctcctgaggctttggatttgacattgcatttgaccttttatgtagtaattgacatgtgccagggcaatgatgaatgagaatctacccccagatccaagcatcctgagcaactcttgattatccatattgagtcaaatggtaggcatttcctatcacctgtttccattcaacaagagcactacattcatttagctaaacggattccaaagagtagaattgcattgaccgcgactaatttcaaaatgctttttattattattattttttagacagtctcactttgtcgcccaggccggagtgcagtggtgcgatctcagatcagtgt

SEQ ID NO: 394 - DNA, 373 bp, Homo sapiens
  misc_feature 283: n = A,T,C or G
ttacattgttgagctattgctgttctcttgggaactgaactcactttcctcctgaggctttggatttgacattgcatttgaccttttatgtagtaattgacatgtgccagggcaatgatgaatgagaatctacccccagatccaagcatcctgagcaactcttgattatccatattgagtcaaatggtaggcatttcctatcacctgtttccattcaacaagagcactacattcatttagctaaacggattccaaagagtagaattgcattgaccacgactantttcaaaatgctttttattattattattttttagacagtctcactttgtcgcccaggccggagtgcagtggtgcgatctcagatcagtgt

SEQ ID NO: 395 - DNA, 411 bp, Homo sapiens
  misc_feature 327: n = A,T,C or G
actgatcattctatttccccctctattgatccccacctccaaatatctcatcaacaaccgactaatcaccacccaacaatgactaatcaaactaacctcaaaacaaatgataaccatacacaacactaaaggacgaacctgatctcttatactagtatccttaatcatttttattgccacaactaacctcctcggactcctgcctcactcatttacaccaaccacccaattatctataaacctagccatggccatccccttatgagcgggcgcagtgattataggctttcgctctaagattaaaaatgccctagcccacttcttacngcaaggcacacctacaccccttatccccatactagttattatcgaaaccatcagcctactcattcaaccaatagccctggccgt

SEQ ID NO: 396 - DNA, 411 bp, Homo sapiens
actgatcattctatttccccctctattgatccccacctccaaatatctcatcaacaaccgactaattaccacccaacaatgactaatcaaactaacctcaaaacaaatgatagccatacacaacactaaaggacgaacctgatctcttatactagtatccttaatcatttttattgccacaactaacctcctcggactcctgcctcactcatttacaccaaccacccaactatctataaacctagccatggccatccccttatgagcgggcgcagtgattataggctttcgctctaagattaaaaatgccctagcccacttcttaccacaaggcacacctacaccccttatccccatactagttattatcgaaaccatcagcctactcattcaaccaatagccctggccgt

SEQ ID NO: 397 - DNA, 351 bp, Homo sapiens
  misc_feature 1, 7, 71, 93, 208, 276, 340, 345: n = A,T,C or G
ngccgangtacaaaaaaaagcacattcctagaaaaaggtattggcaaatagtaaaaatgggaggtcaaaancaaaaaaaaaaaaaacaaaacnaaaaaaagaaaaaaccaacaattcttcaattcagtgtgcaaacattatataaaaatagaaatactaactctacaggcagtatttcctgataaattatttaaatagcatatctacncaatctgagatatctattccaatggcaatgagaaaataatttataaaaataaagcaatggtataccanatgatagaaaaaaacataactttcagaaattgtatttaacatttcaatgctatttccttattgngaatncttctc

SEQ ID NO: 398 - DNA, 363 bp, Homo sapiens
acaaaaaaaagcacattcctagaaaaaggtattggcaaatagtaaaaatgggaggtcaaaagcaaaaaaaaaaaaaacaaaacaaaaaaaagaaaaaaccaacaattcttcaattcagtgtgcaaacattatataaaaatagaaatactaactctacaggcagtatttcctgataaattatttaaatagcatatctacacaatctgagatatctattccaatggcaatgagaaaataatttataaaaataaagcaatggtataccagatgatagaaaaaaacataactttcagaaattgtatttaacatttcaatgctatttccttattgggaatacttctctgcagagtttttatgctatgt

SEQ ID NO: 399 - DNA, 360 bp, Homo sapiens
actgtttcctcgtggttcaggggtgtgcatgaaggctcttaggagagcaaacacctgttcctattctgtatgtccctccctcatttcaaatgagagtaaccaattgagtaaaataaccaaataaccattgccccaccatgaacatggggcttgggaagacagtcctacaatcttcatcatatatttaggtttttaggccagccagctctttttttccaaagctttcttttgaatacccgcccgggcggcccctaagggcgaattctgcagatatccatcacactggcggccgctcgagcatgcatctagagggcccaattcgccctatagtgagtcgtattacaattcactggccgtcgt

SEQ ID NO: 400 - DNA, 87 bp, Homo sapiens
  misc_feature 12, 43, 83, 85: n = A,T,C or G
ctgcacatatcnattacactggcggccgctcgagcatgcatgnagagggcccaattctccctatattgagtggaattacaatncnct

SEQ ID NO: 401 - DNA, 328 bp, Homo sapiens
  misc_feature 206: n = A,T,C or G
acccagggacacaaacactctgcctaggaaaaccagagacctttgttcacttgtttatctgctgaccttccttccactattgtcctatgaccctgccaaatccccctctgcgagaaacacccaagaatgatcaataaaaaataaaataaaattaaattaaaaaaaaaaaaagagaggaacccacaaaaaaaaaaaaaaagaaagtntataaaataaaatattgaagtcctttcccattaaaaaaaaaaaaaagaaaaagcacggactctttcatccagttctgatgtgattatctctggaaggcattttctcctcctcttccctcccc

SEQ ID NO: 402 - DNA, 268 bp, Homo sapiens
  misc_feature 1, 227, 253: n = A,T,C or G
nacataatgacaacatcttcactagactgagtgttcaaggatttgagatgattcgctattcatcacaccccgaagattgagatccactgtatttacacaaagcaaagccatgtcagcaagggactgtcaacctgattctgagaacataaacattcaaaatttattttccagtgttcctttttggaaaccaacaacacatctttaatacctacacacacacacatctntacctttaaaaaaaaaaaaaaagtgnaacttcacagatagt

SEQ ID NO: 403 - DNA, 538 bp, Homo sapiens
acagtgatagctccccctgggcaatacaatacaagaacagtgggttttgtcaaattggaacaaggaaacagaaccacagaaataaatacattggttaacatcagattagttcaggttacttttttgtaaaagttaaagtagaggggacttctgtattatgctaactcaagtagactggaatctcctgtgttctttttttttttaaattggttttaattttttttaattggatctatcttcttccttaacatttcagttggagtatgtagcatttagcaccactggctcaatgcgctcacctaggtgagagtgtgaccaaatcttaaagcattagtgctattatcagttaccaccatttggggcttttatccttcatgggttatgatgttctcctgatgacacatttctctgagttttgtaattccagccaaagagagaccattcactatttgatggctggctgcatgcagacatttaaagcttttagagaatacactacaccagggagtatgactactagtatgactattaggagggt

SEQ ID NO: 404 - DNA, 310 bp, Homo sapiens
tttttttatagatacaattggcttttatttgtgattcatgagtcagggcagtttccattctgcaaaatatagtgatagctcctactgggcaatacaacagtagaacagtgggttttgtaaaatgggaatccaggaacagaagaatataaataaattgatttaaataaactgattggttaatttcagaatacttcatattacttttttctaagagttaaagcagaaaggactttcttactgtgctgactcagacagcctggactctcatgtttttaggaaaattttgtctgttctgggatctacctgcttc

SEQ ID NO: 405 - DNA, 559 bp, Homo sapiens
acaaatcacaattattaactcactggtagggcagtgatgatcaaaccaattgcattcatccatgctgtaatgttctctcttggcactaaaggctgactgcagccggcaaaaaagaatgtaagtatgaatttataaaaacattttagatggctgacaacggatcttatttttaaagaatatgtctaattcagaggatcgacaactaatccatttcaataaaacaatggggaattttttattgaataaaaatgtaatatgcataaaaactcaagaaggctttttaaaaatacttcctccccaatcattatcccatacttcatgctaatttttaaaagaatcttgaaatcttgaaaacaagatgaagagaatcttgttttaagtgacaagttaacattattcctatattaaatgtcaaactgctattaatgagtagaagtaggaacaaacccggatcttaggatcctgtccagggctcattccataactcctatatcacaaagacaagatctggaaccagaaaacagtcatcatccaatgtgcatcagccttgcggcaacag

SEQ ID NO: 406 - DNA, 427 bp, Homo sapiens
acaacagaatatctcgggaatggactcagaagtatgccatgtgatgctaccttaaagtcagaataacctgcattatagctggaataaactttaaattactgttccttttttgattttcttatccggctgctcccctatcagacctcatcttttttaattttattttttgtttacctccctccattcattcacatgctcatctgagaagacttaagttcttccagctttggacaataactgcttttagaaactgtaaagtagttacaagagaacagttgcccaagactcagaatttttaaaaaaaaaaatggagcatgtgtattatgtggccaatgtcttcactctaacttggttatgagactaaaaccattcctcactgctctaacatgctgaagaaatcatctgagggggagggagatggatgctc

SEQ ID NO: 407 - DNA, 419 bp, Homo sapiens
acaatttgtagttgtttccaggtttggctaataatcattccttaacctagaattcagatgatcctggaattaaggcaggtcagaggactgtaatgatagaattaaattagtgtcactaaaaactgtcccaaagtgctgcttcctaataggaattcattaacctaaaacaagatgttactattatatcgatagactatgaatgctatttctagaaaaagtctagtgccaaatttgtcttattaaataaaaacaatgtaggagcagcttttcttctagtttgatgtcatttaagaattactaacacagtggcagtgttaaatgaagatgctgtctacaaggtagataatatactgtttgatactcaaaacatttttcattttgtttaaagtagaagttacataattctatattttaagtct

SEQ ID NO: 408 - DNA, 523 bp, Homo sapiens
  misc_feature 520: n = A,T,C or G
acatttgatgttatgtgaatgttgagtttttttcttctaattttcacttcagcagtgtttagggctttcagatgccttattccagtgtgaacagaaaaagttcatattttatgtggttaatgctttgatgtgtcacataaagagtagtttgtagaaaatgttggcacaattttaacttcttagtggcttgtgacattatatattatatatatatgtatatatatctttataacattcctgtgtttagtagtgtaaatgttctgggcaagttttaatattttgaatgcctttggatattccagcaataaaggcatcatgttctgcaataggatttcttactcatttacctattttaacactaaaatagaccacaactgagcacaaattccttttataaatgttatagaagcagggaagaataataaacacatttgtgaattgtggttcagtttatttatctttagggaaggctgatcatttatcttatagcacataaccccagcctcttattcattatggntaa

SEQ ID NO: 409 - DNA, 191 bp, Homo sapiens
  misc_feature 156, 190: n = A,T,C or G
accccgtagtgatgagcactgactggttcactggccacattttagttcttcataataataggccacaaaagggctctgtggtttgcctccatgtgcactggcccctccccacccctagggggcactcagtagctgctgagaaggcctgtccacgangctgttggaaccccttcaataaatacttagaagna

SEQ ID NO: 410 - DNA, 403 bp, Homo sapiens
  misc_feature 399: n = A,T,C or G
acactggccagtgtgtttttggcgattaaacataatcctgtgaatcagattaattcacttgctgagtgttcatttgcggcatccctctgttgggtcttgggggccctccacgacctcgtggggctccccgtggtccactctgcccagagcctcgcttgaaattctgctgatatccatcccgttgatagccagagtaatcccggggagcactgaactgagactgtgtataaccactgtttggagtgttagagaatgaagggcggtaaccatcatatcctcctctgaatccattggcagggccccggtatccattcatcaagcctctagcaccacgggagcctccacgagacacaccacgactattgtaatagggctgattgctacgtggaaatccagtgntctg

SEQ ID NO: 411 - DNA, 384 bp, Homo sapiens
acgtgaaatcataacaacatgttctcttgtgtttggcttctcttgctcagcatgatatttttacggttcacccatattgcatgtatcaggaatataatcctttttattattgagtagtgttctattgtatgtatataccacagtttatttctcccttcatcctttgctagattttggggttttttcacattgcgctattcaagtataaacctgctctcaacattcatgtgcaagtctttgagtggacatatatttgccgtttctcttgagtgaatgcaccttgttgggtcacgtggcttaatttaaaaaaattttaatcactgtggtgcatatgtagtgattattagtgattatctcataattttattttcttgatgactaatg

SEQ ID NO: 412 - DNA, 315 bp, Homo sapiens
  misc_feature 71, 314: n = A,T,C or G
acaatatttctcctttgagaagataggatatatgattttcccaaaaatcacaactttgaaggaagacttanttgctgacttcaattatatcctggaactggcaacttgtgcccttcctttgcttcaaaaaaagtgtaagaaagagtgataagatcaactttaatcattcttggatcttcagcaaattcaggatcaatgtagaaaaacactggcatatctacttcctcttggggattaagcctttgttcttcaaaacagaagcactgtattttattgaaatactgtccaccttcaaatggaacaatattgtatgna

SEQ ID NO: 413 - DNA, 554 bp, Homo sapiens
  misc_feature 479, 542, 551: n = A,T,C or G
acaggtttcactattacaaatatatgatgttaaactaacaaactcatgaccttcaaagatgtcttcgtcccacgcacacacatttgtaatttgtgtccatttgctatttcccttcttctataatcttcaaattatatagttatgcattgagttccctatgcatctcacccatctcctttatctcagccttctcatactttgccattctcttctttctggaaataaccagcacaacaattccagcaacaactgctatcaccacaaccacaataacagcaataacaccagcttttagaccctgcattgagaattcaggtgctttttcatcaacataataaattaaagtttgaccaggatccagatccagttgttccccatttactgtcaggtgccattttcttagaatgaaacaaggattcacctttaacatctttttcaaaataataagccacatcagctatgtccacatcattctgagntttttgagaagaattttgaaccagatcaatagtgataacattattctcatacaaaatactcgngataaattntgg

SEQ ID NO: 414 - DNA, 267 bp, Homo sapiens
accagaaaggcacacgattttacaatatttgttggaattaccttactttttaacctcctcatagcagttttggtttgagtatattgatgaaagccaaagtctggtatctaaaacttgggccaatgtttcccaactggtatatgtcaggctttcccaatagcttaactgtgaccctatacggatggctttttagatagttctatactgctgtattgtgttagcacttttctttgtcattaacaacacactttaaatgacatttggtga

SEQ ID NO: 415 - DNA, 454 bp, Homo sapiens
accggaacctgcagaaacagtgtgagaaattaagtcctggttcactgcgcagtagcaaagatggtcaaggccatggaaaaagcagaaatttaccaagaaagctgatacccatgtatagttcccactcatctcaaatacatctgctatctttttaagctaagtcctagacatatcggggataacatgggggttgattagtgaccacagttatcagaagcagagaaatgtaattccatattttatttgaaacttattccatattttaattggatattgagtgattgggttatcaaacacccacaaactttaattttgttaaatttatatggctttgaaatagaagtataagttgctaccattttttgataacattgaaagatagtattttaccatctttaatcatcttggaaaatacaagtcctgtgaacaaccactctttcacctagcagtatga

SEQ ID NO: 416 - DNA, 370 bp, Homo sapiens
ccgacacggtgccagcgccctgctgcgtgcccgccagctacaatcccatggtgctcattcaaaagaccgataccggggtgtcgctccagacctatgatgacttgttagccaaagactgccactgcatatgagcagtcctggtccttccactgtgcacctgcgcggaggacgcgacctcagttgtcctgccctgtggaatgggctcaaggttcctgagacacccgattcctgcccaaacagctgtatttatataagtctgttatttattattaatttattggggtgaccttcttggggactcgggggctggtctgatggaactgtgtatttatttaaaactctggtgataaaaataaagctgtctgaactg

SEQ ID NO: 417 - DNA, 463 bp, Homo sapiens
acactttatatattccaaattgatcagatatatggtttgcaaattcatctcaatctgtagcttatcttttcctcttcttaaatcacaagtttttaaattttgaagaagtccaatatatcagattttgtcttttatggatgtgctttcggggcaaagtccaagaacttgtcacctagcccaagatcctgaagatttttctcctgtggcttttttcaaagttatctagttttatgtatcacatttaagtccgttatacattttgagttaaattttatataagatgtgaggtttaagtagaggttcttttttctcctcgccatgggtgtctaattgctctagcataatttgtcagaaaggctattcttcctccattgaattgctttttcactttttcaaaatcagctgagcatatttatatgggtttatttctgggttctctcatctgttccattgacgtatgtgt

SEQ ID NO: 418 - DNA, 334 bp, Homo sapiens
ttagcatttgcttttatttttttactttgatgccttttcaaattggcatgtctttaaagtatttttcttcctgattaaaaatgtgtgtgtatgtgtgtgtgtgtgtgtatatatatatttttttaaatcacattaattttaccaagtgaaaccaagccatactgtttttgagccaattaagaaaattgccatttttaaagtgtagcatttcagggtaaagacccatgaaatggcttgatgtattctagactactgaaagaaaaccacttcaaagattttgttgaaagttttagtgttgtctgaaatgcaagagggaaggtgattggtagtgagt

SEQ ID NO: 419 - DNA, 297 bp, Homo sapiens
acttctttgaccaaggaataccacagacaccctaccgatagaacagtggctcagatcttacttgctcctgcttacgaagtattcccaatcactggtcatctgaccctacttgaacactcctgaacagtcatgttttttaaaatcttcctttatatcaagtcagagagtatacttctataaatttcactcatggatgttaggaaatctagtcatcttccctgtgattgccctgttaagtatttaaccatagctatcatgtgtttcccaaatcttctctagattaaatatcttcagtta

SEQ ID NO: 420 - DNA, 418 bp, Homo sapiens
acgagaggaaccgcaggttcagacatttggtgtatgtcctatcaataggagctgtatttgccatcataggaggcttcattcactgatttcccctattctcaggctacaccctagaccaaacctacgccaaaatccatttcgctatcatattcatcggcgtaaatctaactttcttcccacaacactttctcggcctatccggaatgccccgacgttactcggactaccccgatacatacaccacatgaaatatcctatcatctgtaggctcattcatttctctaacagcagtaatattaataattttcatgatttgagaagccttcgcttcgaagcgaaaagtcctaatagtagaagaaccctccataaacctggagtgactatatggatgccccccaccctaccacacattcgaaga

SEQ ID NO: 421 - DNA, 304 bp, Homo sapiens
acgcctggacccctgtgacttgcagcctatctttgatgacatgctccactttctaaatcctgaggagctgcgggtgattgaagagattccccaggctgaggacaaactagaccggctattcgaaattattggagtcaagagccaggaagccagccagaccctcctggactctgtttatagccatcttcctgacctgctgtagaacatagggatactgcattctggaaattactcaatttagtggcagggtggttttttaattttcttctgtttctgatttttgttgtttggggtgtgtgtgtgt

SEQ ID NO: 422 - DNA, 578 bp, Homo sapiens
actgtgcaggcagattcacagggtggtggtaaagcatccacaatggctctggcagcatcaggatcacacttgaaggggctctcagacaaagttgtattcatgcaactgattccttttccattcgttttcttagtcactaatgctttccaatggtcatgagtgcttttaataatatcaatggcaaagtccttatctttaaattctgcattaaacgcaaactcattttctggttttccatcaggaaccttataccttctaaaccagtccacagtagcttctaagtagccaggtttcagccgtttgacatcattgatatcattataattggctgcatcaggatcatccacattaatggcaatgactttccagtcggtttccccttcgtcaatcatagccaatatgcctagaactttcaattatttatttcacctcttgcacataccttgcttccaatttcacacacatcaattgggtcattgtcaccacaacagccagtatgtttatcattgtgccctgggtcttcccaagtctgagggatggcaccatagttccagatatatcctttatacgggaacaaa

SEQ ID NO: 423 - DNA, 327 bp, Homo sapiens
  misc_feature 309, 312: n = A,T,C or G
acagtatatttttagaaactcatttttctactaaaacaaacacagtttactttagagagactgcaatagaatcaaaatttgaaactgaaatctttgtttaaaagggttaagttgaggcaagaggaaagccctttctctctcttataaaaaggcacaacctcattggggagctaagctaggtcattgtcatggtgaagaagagaagcatcgtttttatatttaggaaattttaaaagatgatggaaagcacatttagcttggtctgaggcaggttctgttggggcagtgttaatggaaagggctcactgntgntactactagaaaaat

SEQ ID NO: 424 - DNA, 384 bp, Homo sapiens
acgaaaaataaatctccttaaaaactaaataaaatgcactgtattcttacagttaatgtttataactatagtaaaaaattaatatatatcctattacataaatgttatttcttaggtgttccattaagaagagcaatagaataatgctaaaaaataatgcctataaatcttcagagtataaagacatccattcagaaacaaaaattagcactaaattttttataaaatagaccagatgacaaaatttattttatttttaaacagtggttttgacacaaattatgttattgaaaagcattattaatgtttaatttatttaaaattttggaatttgccatttctcagagaatgatcaggccttaggaaattaatacagtagtagta

SEQ ID NO: 425 - DNA, 255 bp, Homo sapiens
actatcaggctttgtgctgatttcctgaacaaactgcattatattatgaaaacaaaaggaaaagaagaaataataaaaactatactcccatatttcacttacagtgtttgagttcctggaaggacctatataatggaggcagcattcaaacaagaaattatgccaatcaactgtcaaattttcactataattttcctaaaaaggcgtttttcccccaatatctattaatctcaaagaaacataagttgtgaatgt

SEQ ID NO: 426 - DNA, 196 bp, Homo sapiens
  misc_feature 8, 10, 11: n = A,T,C or G
acatgaantnnccaggcccacacagccagacagcaacagaaccaagacctagggctcttcactcctgttacatcacaccatggcaatgattttacattctccaactgattcaaatcatatggcagctagggatttgggggctccatgttttatttcaattgcaagttcaagatttctttttatctttgtgggctga

SEQ ID NO: 427 - DNA, 163 bp, Homo sapiens
acagaagatccatggaggcaagtgctgtcaggaaggacactgcctccctccaccctcccaaatgtcaccaccaagttccttcaggtgagacctcacacaatgtcaagtgctttctaggaaatactaagatcaggttgagagattctgcttggtctagtcaatc

SEQ ID NO: 428 - DNA, 315 bp, Homo sapiens
  misc_feature 1, 10: n = A,T,C or G
nactgagtanagatgctggggaatgtgcaatatgccttgaagaattgcagcagggagatactatagcacgactgccttgtctatgcatatatcataaaggctgcatagatgaatggtttgaagtaaatagatcttgccctgagcacccttcagattaagcgtcagcttcctgttttataggttttcttgtcttgacaagatgcttgaaaaaccaagaggatatgaaaatctgtctctggagaaacaaagacgcaggcatactcagccagaaatctgagttttgtgagacttggtaatacagagatggacaatcgt

SEQ ID NO: 429 - DNA, 131 bp, Homo sapiens
  misc_feature 10, 42: n = A,T,C or G
acagttaggnactagaacatttgttaagcctcccaaagtagngtgcatggaagattctagagtgtccagctcttgcactacaaatgtaataataacagaataaatacacttaccctgatgatattgagggt

SEQ ID NO: 430 - DNA, 503 bp, Homo sapiens
actgatttttaataaaagaaataaggttcaaagtttagcacaacaacacagcaataagaagctgacaacttggataaaaatacaagaaagtaacacagagcccaggctacccattatttactgtgtgcatacaggaatgctatacttcagatgtataaattagagactgattttaagttattaatttaactactttttgtccactgtgctaaactaaattttatactaatgtgctactgcgtaaacacttcaaagcaatcttcattaaaatgctgcaaagaaaaacaagaatacacatcatccaaaactaaggatgtcattgcagttcacagtttgtataataaataccctccctttcaatcactactaagatcactacatcctatctactcatcagcacaaccttgaagcaacttatacttacaaatattagcaatgcagccaaacatttgttttttgcaaagcaactagtaaaaatcaagaattttaattaagacggtgca

SEQ ID NO: 431 - DNA, 207 bp, Homo sapiens
acaagtgtggcctcatcaagccctgcccagccaactactttgcgtttaaaatctgcagtggggccgccaacgtcgtgggccctactatgtgctttgaagaccgcatgatcatgagtcctgtgaaaaacaatgtgggcagaggcctaaacatcgccctggtgaatggaaccacgggagctgtgctgggacagaaggcatttgacatgt

SEQ ID NO: 432 - DNA, 485 bp, Homo sapiens
  misc_feature 37, 43, 56, 59, 435, 438, 453: n = A,T,C or G
aaaaaaagtaatggaaaaatggttgcaggtttaatcncaaaangaacttaattttngtngattttgttttatctgctaaaacactaatatctataaatatgaactgacagcatcgttctaaatttacttctgaagagctgtcgagacttcaataaaatataagcaagttactggatcatatttatggactgctgaattaactacccgaaaagtatcagttactttcaaagaacacaaaacaaagtgaacgtggaaaaaagccttctttgcaaaagtccttttattagtcctatcctctaaaattccaagccacagagccttgatattcctggattctgttttaagtaaccttagttttaaatatgacacttgggatatgcacaatgggaaagggtaggatatgtgaacaaaatttaatttcttttttccaaaggnagncattttctttaaatncatcctatccacttttgcccacttccccatgt

SEQ ID NO: 433 - DNA, 280 bp, Homo sapiens
actgtcactacaatattacattctgcaaatgttattctgttgtatcagatacaaaattttagtgaggtatctctaaggcacatagtagaaaacaaaattggttaattactcaagttcctttcactgtgatttggaaatgatttaatctttatagaatgagaaccttttttggactagcttttttattaaaatggctcaatttgtgttgataaggattgcattaatatttaatagtgcttgcttttcctctgggcacaccattttgatcattaaccagagt

SEQ ID NO: 434 - DNA, 234 bp, Homo sapiens
ctttgctgcgcatcaggtgctttaagcttcggaacaactgtgcaggattctattttagtattctggaagcatcattgaggaagtagtccagtgaagttagctctaaaaaaactctttactctaacaattaaaagaaatatgccaaaggatccataagggatgaataaattattaaactattaagaagttgctataaatatgcagtgttaattcaataattcataacggactggt

SEQ ID NO: 435 - DNA, 330 bp, Homo sapiens
acctcccgtgtcaccagttcccacagaagcactgcaaaactccacatgtctgctgagcgtctgtttgtgtcttcaggcttcttctgcagagcttcgggggctacccaggcaggtgcatacatgcgaccaggacattggaaagagaacttgacatcagccatgctaattcgggcagtcatgtcctcatcaatcattacactacggctattgagtgcatgtcgtgggatgaggggctctagtgtgtgtaggaaagccatgccccttgccatgtccaaagcaaacttcacagcctggctctggtccacgacgaaattggtgccttcatgtagt

SEQ ID NO: 436 - DNA, 311 bp, Homo sapiens
acaactttacaatggaattgtatttcaatgattattttgatatcagattaaaccttccaaaaagttacacataattcaggtctattttttctaccagtaagagttctgctaaattacaaaaccccataatcacagtgttcagtttttaaaaaattaaacacacagtaatcctgtcaatgttaatcaaaatcaaaacttcggaatgccgtggcatttatgtgaccaatctgagttttagatacaaataccagctgtttatcccatgaaccatttttcctaggctgaggctgtgaaaaatcgaaagtcggcgt

SEQ ID NO: 437 - DNA, 355 bp, Homo sapiens
actagtggatgggggtcagggtgtcactccaaggccctctacagacccagagaagaggaaagtcaaaaaagccagatatgagactgctgaagtggtgttaagaaatataggcaaggtaaagggaacaagatctgggctccctcctacttgtgtccctcactggacctcagacaccctacctctaagactggttcttagaaggctgaacagtaaggagcattccaatagcttctgaaactcccaaggctgtttcaagtagtcgaaagccatccctggactgttcaggtgccttttctatttcccacctgagctctctgccctttctttgagcctcacaggtttccagaattacagt

SEQ ID NO: 438 - DNA, 431 bp, Homo sapiens
acagtaactttaactttacatagagctgagataaaaataaagctttcttacaaattacattttttttccagtgaattacttttgcagtaaaaatagctgctacataaatccctcctgatctctgaaaaggagttgcatatttccaaaaataatattcttattttaatcacacagaagaacgtggagcacaggaaggaaatggctgggtggtcagagagaggtgagctgtcggagaaacacagttaaactaaaaaataaaatccattttgtgtataaactgacttaaacgcatgcaaagaagtggaaaacatatgccatttgtcaagaaaaatactgctttatagcttttactttacaattaaaggagaaagcagaggccagatataagcccagataataacatttaagtttctcataaaactcccaaatgt

SEQ ID NO: 439 - DNA, 170 bp, Homo sapiens
actgtcataaaaaacagtggagctctgtattagaaagcccctcagaactgggaaggccaggtaactctagttacacagaaactgtgactaaagtctatgaaactgattacaacagactgtaagaatcaaagtcaactgacatctatgctacatattattatatagtttgt

SEQ ID NO: 440 - DNA, 400 bp, Homo sapiens
acgtaaaaagaacatccttcccatcttcaaggtcaagattgaacgctgactcctgcaggaagtcttccaggattcccaggcaggaatgatggctccctgtccctgtagctccaggagttcttgcttcacgcacgcctcacataccagactgaatgttggcaggaggagtgaccaggtcggtcatctgtgtccctaccacctacaacaggccagcaatctacccgtgtgtgtttgttggacagaattaaccatgatgggcggccgagggcgcctggagctatttgggggcttggagagaacctcttaggagagtgtcaggctctaggccagtgtcaccagaggaggtcagtctcagtccttggagtggtgggatggaaaccagacgggactggcatggtcc

SEQ ID NO: 441 - DNA, 204 bp, Homo sapiens
acctagttacttcttaagatcaggtgtataaaactgtggagtggagcggtatggtatggaatgacttggaatgtaagctgtcagggagaaaatgttgttacacttttgctaagatctgggggtttcttcatattcctgctgttggaagcagttgaccagaaatgcttgccagtactgccaaagcactgctgtgaaatgtgaagt

SEQ ID NO: 442 - DNA, 649 bp, Homo sapiens
acatttaattttttacaacattttctccctagagatataatttagatattcctatcttcaaagtaaaaatcaaaataggaaataagcatagaaacagcctattggcagtggttacacctgcatggtatttatgagtctccaaactattggaaatttatttcaaccaaggttctcttaagtcttcattacttgggtgtaactcgagagaaaactaatttatatcaatttacagtttagtggtcatgatcaggggaaagtgatactcttccactgactacaagtcattgcagaggcagtttagaacttttcctttattcctaatatacaggacaaaccttgccgacatctcactacctcaaaaatcaaatttaaatgaagtatccaggagtagcctaaagaatgagtgtaatctggatggattttagtctaaatttatgccttgctcttcagtaaagtatagtaactccagatatatgttccacagatgcaataatttctgttccttgttcggtgcagaatataatttatacttcctgaaatcaactttgtctattcatgaaaatagctgctttttatttgcctttgtctcactttgaatatatatgatccacaggttacagacttttccaataactacatttcaacttgt

SEQ ID NO: 443 - DNA, 346 bp, Homo sapiens
acgtgggattgaaatgcacatacatgtttttgctaagagcacatacatttcattctcctcactttgttcataacctcagcattgtcagataacctcagtgagttaactcaaagccttttattatggaaagaactggcacagttacatttgccagtggcaacatccttaaaaattaataactgatgggtcacggacagatttttgacctagttcctttttcttttagagcaaaaagaacttttacctcggcatccagcccaacccctaaagactgacaatatccttcaagctcctttgaaagcaccctaaacagccatttccattttaatagttggatgcggattgt

SEQ ID NO: 444 - DNA, 425 bp, Homo sapiens
accaatttccttttacagtaaaggggcttttcctgttgcttgttgaaccggttcccagctgcccattaccaccaagcccaaaagagtaaattcgtcctgatgaaggaacaaaagcagaagtgtgctgccgtccacaagcaatctcagtgacaatgcttcccataagttcaaaaactttccttgggtttatttcatgactggtagaattatggcccaactgaccataccctccagctccaaaagtaaacactccaccttccttggttagagcagcagtatgatcttctccacaacaaatataaactattttctgagatcttagtgactttagtaaattaggaacatacctatcattttcatcattaagacctagctgaccaaacttgttgcgtccccatccaaagatagctccagaaagggtgagt

SEQ ID NO: 445 - DNA, 210 bp, Homo sapiens
  misc_feature 1: n = A,T,C or G
nactgtcccaatataaaacagtaattatttgacctttgcactgtttgtctggtccttttcagtttgattgcatataaatgtggaacttgatagatctctatatttttaatgcacttgtgataaactggcagcagggttagacattactttcaaagcttgaggtagaccgagtcagcatgctagacaggcttctctctctaaccaaaactg

SEQ ID NO: 446 - DNA, 326 bp, Homo sapiens
tcgaaagacccctgtaaaagagcccaacagtgaaaatgtagatatcagcagtggaggaggcgtgacaggctggaagagcaaatgctgctgagcattctcctgttccatcagttgccatccactaccccgttttctcttcttgctgcaaaataaaccactctgcccatttttaactctaaacagatatttttgtttctcatcttaactatccaagccacctattttatttgttctttcatctgtgactgcttgctgactttatcataattttcttcaaacaaaaaaatgtatagaaaaatcatgtctgtgagttcatttttaaatgt

SEQ ID NO: 447 - DNA, 304 bp, Homo sapiens
  misc_feature 1, 3, 6, 31, 34, 35, 79: n = A,T,C or G
ncntcnaggtacatgctagaagtctgatgtngtnngtaacacagaaacatacacagtcttcatattcaaagtcttcacngggatgtcgttctgtaatttcctgcgtttgggtctcttccagaaacagctttagcttcctgctccgaaggccaaacaccttggctgcttcatacagaagaccttggtgggtgagtccattctgcccaagtgggttttcaagcaggagagtgcccactgtccccattaaacactcttgtggctttgcattcaggagctgtaggttgatatactgacaaggaagagt

SEQ ID NO: 448 - DNA, 203 bp, Homo sapiens
acatgaaagcggcaatgcggtaaaaagcgaattcttacccaaggtcagaattttttattaagcgcattttcattagttggacaaacaaccttataaacccttatgtcaaaccatataatgtgaagaatctccatgggagagattttttttcacccttcagaattatctttttcccctaagaccttcatatgaatcttccttgt

SEQ ID NO: 449 - DNA, 481 bp, Homo sapiens
  misc_feature 458: n = A,T,C or G
acttgttctataatactctgatgtttccttaaattcctgaacaacattctgtttactaaatttcttttcttcctttattcacaccaaattccaccctataatagaagctaattatttcagaaagctttttagtgatcatttattactttgtgtttactagatattaattctaagatgaattcctttagaattttagaaaaaattattctagacaacaatcaaagtaaaggatacatccagcattgaaaccataagccggcaagtctccaggttaaaaggtttgtatcctccagcaatgccagactgtgtcagacatctctgcaattcatcagcatctatctgcccatcctgtccagctacagcagcaaagtaaccatacagcggatcctgagtttgtccgggaaacgcaggccctccgggagcccctccatactgcatcttgagttgaagtcttatangtagaagctggtgatccttagag

SEQ ID NO: 450 - DNA, 296 bp, Homo sapiens
acatggtttaatacaacaacaaaaaaatttaatcaagtgaaacgtaataaactgaacaataaacactcaaaacattttccattggaaacatgtaaagacaatatgaggttttgttaccatcttactgcaattttcttatgtgttactagtctacataccccatgttttctgtaatcatgcagatgtgaatggaagtttgaatgattaaataaatgaaaagtccgtttactgcagggaatcatttcacaaggcagccaaaccgggtttagagaacaaaactattcaagaaattctcc

SEQ ID NO: 451 - DNA, 294 bp, Homo sapiens
  misc_feature 6, 20, 198: n = A,T,C or G
acatgntccaaggcacgcgnctgtgaacttcctctgagtgaaggcatcccctccagcacctttcagcctgctagttaggacgacccgccgccaccctccaggacctccagccctgcactgcctttcctctcttttaaataattcttcattgagttctaatatgtaaaaaaaaagtttactgtaaagtttgcaaataangaaattttttttaaaagtcctcagtaatcttaccagtaacaattgttatgggcacatttgcttttggaagatttcttttgtatgcatgggataagt

SEQ ID NO: 452 - DNA, 129 bp, Homo sapiens
acttttagatcacaaatttgcctttaagtaacacataatacacttaaggcagatttgccttacaggtggcctcagcttctaaacaccactacactgctttatataaaaaacaaaaatcacatagaagag

SEQ ID NO: 453 - DNA, 151 bp, Homo sapiens
  misc_feature 9, 10, 44, 46, 47, 150: n = A,T,C or G
actctcaanntgtatttaggtgccaacacatttaggatcattgngnnttctcagtgaattgacctttttatgagaataaaatgtctatttctgaaatgtccctatttctggaaatgttccttatactaaagtccaacttgtgtggattant

SEQ ID NO: 454 - DNA, 119 bp, Homo sapiens
  misc_feature 9: n = A,T,C or G
tgctgatgnagcatgctttttaaatcctttaaaaacactcaccatataaacttgcatttgagcttgtgtgttcttttgttaatgtgtagagttctcctttctcgaaattgccagtgtgt

SEQ ID NO: 455 - DNA, 515 bp, Homo sapiens
accttataaagttccttttcatccttctctgtcttcaactgacattcaagttgttctctttcatgttgtgccttcttgagtttggcctttaaactgtctaattcggtttctttttcaattgctttatgtgttactgacacaatatcttcctcaagctgatgggctttggatgtagcatcactgaacctcttcttaaactcttcattttccatttttaagctttgtgttacttcagtaagacccttttgttctgcttgcagttggtcacatctttctttctcatggttaagttctctttccattctcccaacttgttctcgaagttgtgctgtttctttttccagaacggcaattaactttaacagttcttctttttctttcatggttttctcaattttcaactcaagaaggcctgcttttgtggtcaccactaacatgtcagaatttccttcatcttccatagtaagcagctcttcaactggagaagaagctcgaaactggaaaggtgtacctgc

SEQ ID NO: 456 - DNA, 350 bp, Homo sapiens
  misc_feature 310, 326: n = A,T,C or G
actcccctccccaaatagaaacctcaaagactgatccatttcccctagggcctgggccaggagtagctcactgctcactgctgaggagaaaggcacaagatataatgtcataagagcaggacagtggctcagcctacagagttccctataggggaaagaaggcaggaaataggcgcagggtctggtcctgtccctgcaccaccctgagcagctagtcttgggaagggattacaggccctgggccataggctgctcgccattctgctttcctatcctgtttctctccctgtgctgctcccttttagccagngctgagaaatgttcancacctgaggcaaaactgccatagt

SEQ ID NO: 457 - DNA, 293 bp, Homo sapiens
gcagggccaacagtcacagcagccctgaccagagcattcctggagctcaagctcctctacaaagaggtggacagagaagacagcagagaccatgggacccccctcagcccctccctgcagattgcatgtcccctggaaggaggtcctgctcacagcctcacttctaaccttctggaacccacccaccactgccaagctcactattgaatccacgccattcaatgtcgcagaggggaaggaggttcttctactcgcccacaacctgccccagaatcgtattggttacagctggt

SEQ ID NO: 458 - DNA, 500 bp, Homo sapiens
actagactccagattaccctttcttaataaatatctcagggtaaggaaagaaagaaactgtatagatatatttaaaatagagaatactttccaagcaatacatgatgcctttcctaaaagactctaaaagaaaaagattctgtaactctcttttagcaccaaattattgtttatcttgctggatattttatatgaacagtgttaatttagatgcactaaagcaaaggtaggcaaactacaaccatgagtcaaacatggccacacccattcatttgctattgtctaagctggttttgcactacaactgcagagttgaatagatgcagcagatcctttacagaaaaagttttctgacctcaattctaaagtaattgtagtagggagctggaggactttctttccctttatggtaattttttgagctacaaaaagagccttgcagaaatgggtgaagggattaatcttttaaaaataaatgctatatattaggaaaataaaaa

SEQ ID NO: 459 - DNA, 394 bp, Homo sapiens
ggtgaaaagacttgattttttgaaaggattgtttatcaaacacaattctaatctcttctcttatgtatttttgtgcactaggcgcagttgtgtagcagttgagtaatgctggttagctgttaaggtggcgtgttgcagtgcagagtgcttggctgtttcctgttttctcccgattgctcctgtgtaaagatgccttgtcgtgcagaaacaaatggctgtccagtttattaaaatgcctgacaactgcacttccagtcacccgggccttgcatataaataacggagcatacagtgagcacatctagctgatgataaatacacctttttttccctcttccccctaaaaatggtaaatctgatcatatctacatgtatgaacttaacatggaaaatg

SEQ ID NO: 460 - DNA, 279 bp, Homo sapiens
  misc_feature 4: n = A,T,C or G
actnccgattgaagcccccattcgtataataattacatcacaagacgtcttgcactcatgagctgtccccacattaggcttaaaaacagatgcaattcccggacgtctaaaccaaaccactttcaccgctacacgaccgggggtatactacggtcaatgctctgaaatctgtggagcaaaccacagtttcatgcccatcgtcctagaattaattcccctaaaaatctttgaaatagggcccgtatttaccctatagcaccccctctagagcaaaaaaaa

SEQ ID NO: 461 - DNA, 278 bp, Homo sapiens
tttggacactaggaaaaaaccttgtagagagagtaaaaaatttaacacccatagtaggcctaaaagcagccaccaattaagaaagcgttcaagctcaacacccactacctaaaaaatcccaaacatataactgaactcctcacacccaattggaccaatctatcaccctatagaagaactaatgttagtataaagtaacatgaaaacattctcctccgcataagcctgcgtcagattaaaacactggactgacaattaacagccaatatctacaatca

SEQ ID NO: 462 - DNA, 556 bp, Homo sapiens
aacgtccaagggggccacatcgatgatgggcaggcgggaggtcttggtggttttgtattcaatcactgtcttgccccaggctccggtgtgactcgtgcagccatcgacagtgacgctgtaggtgaagcggctgttgccctcggcgcggatctcgatctcgttggagccctggaggagcagggccttcttgaggttgccagtctgctggtccatgtaggccacgctgttcttgcagtggtaggtgatgttctgggaggcctcggtggacatcaggcgcaggaaggtcagctggatggccacatcggcagggtcggagccctggccgccatactcgaactggaatccatcggtcatgctctcgccgaacccgacatgcctcttgtccttggggttcttgctgatgtaccagttcttctgggccacactgggctgagtggggtacacgcaggtctcaccagtctccatgttgcagaagactttgatggcatccaggttgcagccttggttggggtcaatccagtactctccactcttccagtcagagtggcacatcttg

SEQ ID NO: 463 - DNA, 659 bp, Homo sapiens
cacactgtgcccttccagttgctggcccggtacaaaggcctgaacctcaccgaggatacctacaagccccggatttacacctcgcccacctggagtgcctttgtgacagacagttcctggagtgcacggaagtcacaactggtctatcagtccagacgggggcctttggtcaaatattcttctgattacttccaagccccctctgactacagatactacccctaccagtccttccagactccacaacaccccagcttcctcttccaggacaagagggtgtcctggtccctggtctacctccccaccatccagagctgctggaactacggcttctcctgctcctcggacgagctccctgtcctgggcctcaccaagtctggcggctcagatcgcaccattgcctacgaaaacaaagccctgatgctctgcgaagggctcttcgtggcagacgtcaccgatttcgagggctggaaggctgcgattcccagtgccctggacaccaacagctcgaagagcacctcctccttcccctgcccggcagggcacttcaacggcttccgcacggtcatccgccccttctacctgaccaactcctcaggtgtggactagacggcgtggcccaagggtggtgagaaccggagaaccccaggacgccctca

SEQ ID NO: 464 - DNA, 695 bp, Homo sapiens
accttcatttgaccccatcagcttcagggccttctttacatttccactggcctgatccatgtatgcaatgctatttttgcagtgatatgtgatgttctgggaagctcggctggagagaagtcgaaggaatgccagctgcacatcaaggacatcttcaggaagttcaggattgccgtagctaaactgaaaaccaccatccatggactctccaaaccaaacgtgtttcttctcagcactagaatctgtccaccagtgtttccgtggaacattcaaaggattggcacttatgcatgtttccccagtttccatattacagaataccttgatagcatccaatttgcatccttggttagggtcaacccagtattctccactcttgagttcaggatggcagaatttcaggtctctgcagtttctagcggggtttttacgagaaccatcaggactaatgaggctttctatttgtccattaacagacttgagtgaagtcataatctcatcggtgttgattttgaaatccattggttcatctccataatacggggcaaaaccgccagctttttcacctccaatcccagcaatggcagcggctccaacaccaccacagcaaggaccaggggcaccaggaggtccaggagggcctggttgccctgggtggcctggggagccctcagatcctctttcacctctgttac

SEQ ID NO: 465 - DNA, 73 bp, Homo sapiens
caggtccagagctcccaggtttccaggttgcagtccctccagtcccagagctcccagggtttcggtttccagt

SEQ ID NO: 466 - DNA, 507 bp, Homo sapiens
  misc_feature 15, 453: n = A,T,C or G
agcactggcagaggnagccaaatatagtgatgtgcgccagagataagtattctcctctccaagcatattgctatacaagactttaaagacttcataaaagccaaacttgcagagtccctgcatggagtagccaaggaaagtcggagcccatcctttagccaaaccacgaacaccatcctctttaagtgtaactgagaatccgttaaatatgcccttgtacttttgggggtccacctgcatacggcatttcactaaatccaggggaaccacagcagtgtgtgtcagaccacaacttaagaccccaccaaagccacacagtgcataatacttcgcggagccaaattcacaactgtactcttccacggcggcggctgccaggttgcgagggcggcggggctggcccgtgggccctggggagctgctgcggaggtccccgagaccatcgtgcaccanctgcagatgtggcgtgttgaaggggttcgcccgcgccaggtgcgccacggacga

SEQ ID NO: 467 - DNA, 183 bp, Homo sapiens
cctcatgagctaccgggccagctctgtactgaggctcaccgtctttgtaggggcctacaccttctgaggagcaggagggagccaccctccctgcagctaccctagctgaggagcctgttgtgaggggcagaatgagaaaggcaataaagggagaaagaaaaaaaaaaaaaaaaagggcggccg

SEQ ID NO: 468 - DNA, 129 bp, Homo sapiens
  misc_feature 29, 81, 84, 90, 108, 110, 123, 128: n = A,T,C or G
gcggccgcgtcgaccggcgccgtcgggcnccgggccgggccatggagctgtggacgtgtctggccgcggcgctgctgttgntgntgctgntggtgcagttgagccgcncngccgagttctacnccaang

SEQ ID NO: 469 - DNA, 243 bp, Homo sapiens
  misc_feature 15: n = A,T,C or G
gcggccgcgtcgacnggccatggagactgtggcacagtagactgtagtgtgaggctcgcgggggcagtggccatggaggccgtgctgaacgagctggtgtctgtggaggacctgctgaagtttgaaaagaaatttcagtctgagaaggcagcaggctcggtgtccaagagcacgcagtttgagtacgcctggtgcctggtgcggagcaagtacaatgatgacatccgtaaaggcatcgtgctg

SEQ ID NO: 470 - DNA, 452 bp, Homo sapiens
cctcaagtacgtccggcctggtggtgggttcgagcccaacttcatgctcttcgagaagtgcgaggtgaacggtgcgggggcgcaccctctcttcgccttcctgcgggaggccctgccagctcccagcgacgacgccaccgcgcttatgaccgaccccaagctcatcacctggtctccggtgtgtcgcaacgatgttgcctggaactttgagaagttcctggtgggccctgacggtgtgcccctacgcaggtacagccgccgcttccagaccattgacatcgagcctgacatcgaagccctgctgtctcaagggctcagctgtgcctagggcgcccctcctaccccggctgcttggcagttgcagtgctgctgtctcgggggggttttcatctatgagggtgtttcctctaaacctacgagggaggaacacctgatcttacagaaaataccac

SEQ ID NO: 471 - DNA, 168 bp, Homo sapiens
  misc_feature 18, 37: n = A,T,C or G
cttctccgctccttctangatctccgcctggttcggnccgcctgcctccactcctgcctctaccatgtccatcagggtgacccagaagtcctacaaggtgtccacctctggcccccgggccttcagcagccgctcctacacgagtgggcccggttcccgcatcagctc

SEQ ID NO: 472 - DNA, 479 bp, Homo sapiens
  misc_feature 71, 87, 182, 218, 288, 322, 358, 386, 407, 423, 429, 473,479: n = A,T,C or G
gccaggcgtccctctgtctgcccactcagtggcaacacccgggagctggtttgtcctttgtggagcctcancagttccctctttcanaactcactgccaagagccctgaacaggagccaccatgcagtgcttcagcttcattaagaccatgatgatcctcttcaatttgctcatctttctgngtggcgcagccctgttggcagcgggcatctgggtgncaatcgatggggcatcctttctgaagatcttcgggccactgtcgtccactgccatgcagtttgtcaacgngggctacttcctcatcgcagccggcgttgtggtntttgctcttggtttcctgggctgctatggtgctaanactgagagcaagtgtgccctcgtgacgntcttcttcatcctcctcctcntcttcattgctgaggntgcagntgctgaggtccgccttggtgtacaccacaatggctgagcccttnctgacn

SEQ ID NO: 473 - DNA, 69 bp, Homo sapiens
gagcgatggagcgtgggtagggagggtccacagtgtccactcgccgtgtgcgaaggttgactcggtagt

SEQ ID NO: 474 - DNA, 155 bp, Homo sapiens
gccgccactgccgggagagctcgatgggcttctcctgcgcgccgcccggtgtctggccgagtccagagagccgcggcgcctcgttccgaggagccatcgccgaagcccgaggccgggtcccgggttggggactgcaggggaaggcagcggtggcg

SEQ ID NO: 475 - DNA, 282 bp, Homo sapiens
ggcttcgacgttggccctgtctgcttcctgtaaactccctccatcccaacctggctccctcccacccaaccaactttccccccaacccggaaacagacaagcaacccaaactgaaccccctcaaaagccaaaaaatgggagacaatttcacatggactttggaaaatatttttttcctttgcattcatctctcaaacttagtttttatctttgaccaaccgaacatgaccaaaaaccaaaagtgcattcaaccttaccaaaaaaaaaaaaaaagggcggccg

SEQ ID NO: 476 - DNA, 434 bp, Homo sapiens
ctccaggacagcgtccagcttggtgtcgttgaagacgaagtggagcggatggttgtagaaacgagtgatggtgctgagcggcgtgcagtcttcgggatccacgaaggccaagtccttgaggtagagcatgtccacgatgttggagcgctcctcctcgtacaccgggatgcgcgtgtggccgctctgcatgatgctggccaggacgccgaagtccagcacggtgctggcgtccagcatgaagcagtcttcgaggggcgtgagcacgtcctccacggtccggcagcgcagcacgcccttgctgagatcgctgtaggggtcgccgccgccgcgcgccagctccagcacccgctcccgcagccgcccgggccgcgccgccagctccagcagctgccccacgggcagcgcgacgggcagagtgagcaggacggccaggc

SEQ ID NO: 477 - DNA, 314 bp, Homo sapiens
ggcgggcgctagctggctccgggcagctcggccttgggggcttcggggccccgagacgcggggcgtatgagtggggcgtgcgctccacgcggaagtcggagcctcctcccctggatagggtgtacgagatccctggactggagcccatcacctttgcggggaagatgcacttcgtgccctggctggcgcggccgatctttccgccctgggaccgcggctacaaggacccaaggttctaccgctcgccccctcttcacgagcatccgctgtacaaagaccaggcctgctatatctttcaccaccgttgccgcctt

SEQ ID NO: 478 - DNA, 317 bp, Homo sapiens
aacagagtgatcattccagttaagcggggcgaagagaatacagactatgtgaacgcatcctttattgatggctaccggcagaaggactcctatatcgccagccagggccctcttctccacacaattgaggacttctggcgaatgatctgggagtggaaatcctgctctatcgtgatgctaacagaactggaggagagaggccaggagaagtgtgcccagtactggccatctgatggactggtgtcctatggagatattacagtggaactgaagaaggaggaggaatgtgagagctacaccgtccgagacctcctggt

SEQ ID NO: 479 - DNA, 171 bp, Homo sapiens
aggtgctttgctagatgctgtgacaggtatgccaccaacactgctcacagcctttctgaggacaccagtgaaagaagccacagctcttcttggcgtatttatactcactgagtcttaacttttcaccaggggtgctcacctctgcccctattgggagaggtcataaaatgt

SEQ ID NO: 480 - DNA, 65 bp, Homo sapiens
cccccagtggaaggctcccaccctggtagatgaacagcccctggagaactacctggatatggagt

SEQ ID NO: 481 - DNA, 207 bp, Homo sapiens
cacagcgtgctctgcggggtcactcccactttgttagtgatgtggttatctcctcagatggccagtttgccctctcaggctcctgggatggaaccctgcgcctctgggatctcacaacgggcaccaccacgaggcgatttgtgggccataccaaggatgtgctgagtgtggccttctcctctgacaaccggcagattgtctctggat

SEQ ID NO: 482 - DNA, 319 bp, Homo sapiens
  misc_feature 252, 258, 268: n = A,T,C or G
cacactgtgcccttccagttgctggcccggtacaaaggcctgaacctcaccgaggatacctacaagccccggatttacacctcgcccacctggagtgcctttgtgacagacagttcctggagtgcacggaagtcacaactggtctatcagtccagacgggggcctttggtcaaatattcttctgattacttccaagccccctctgactacagatactacccctaccagtgcttccaaactgcacaacacccnagcttnctcttccagnacaagagggtgtcctggtccctggcctacctccccaccatccagagctgct

SEQ ID NO: 483 - DNA, 233 bp, Homo sapiens
  misc_feature 212: n = A,T,C or G
acaggcccagtggcgcctagccttcagctgctgggctctcccgagcctgccttagcccatacaaccacttgatcacgcgggcattgcgctccaccaccgacacgccatagggaacgcgctcccgggcccgctcctcaacagtcaccgagctgcggcgggagcagcccccttcagagctgcccggcccagcactgggccctgccagggacacnatatccgagctggcccgtgcc

SEQ ID NO: 484 - DNA, 194 bp, Homo sapiens
agagcccttgctggggggtgcctgggagatggggtaagaagagctttcatttgtctggtagatagatagcatgtaagggggtggttgtcccaggaggcagctgctgacaggtttgctacacacagccccggactgtgttgcctgggtgctcattcagagaggggctatcatctgggagcctgtgcccctgggtc

SEQ ID NO: 485 - DNA, 67 bp, Homo sapiens
tccatatccaggtagttctccaggggctgttcatctaccagggtgggagcctcccactgggggaagt

SEQ ID NO: 486 - DNA, 70 bp, Homo sapiens
taccgagtcaaccttcgcacacggcgagtggacactgtggaccctccctacccacgctccatcgctcagt

SEQ ID NO: 487 - DNA, 257 bp, Homo sapiens
actcccgattgaagcccccattcgtataataattacatcacaagacgtcttgcactcatgagctgtccccacattaggcttaaaaacagatgcaattcccggacgtctaaaccaaaccactttcaccgctacacgaccgggggtatactacggtcaatgctctgaaatctgtggagcaaaccacagtttcatgcccatcgtcctagaattaattcccctaaaaatctttgaaatagggcccgtatttaccctatagt

SEQ ID NO: 488 - DNA, 378 bp, Homo sapiens
actctgctatggtgctggcttcctttaaactcaggatagatgccaggtgggctccgtttccgtaagactgacactcgagctcggcatcagaccagttcctcagcttcctgaagtaaccatagcaattggacttgtggtaaaaccatccaggagcacagctgggtctcatgatgatatcacccaggactcctgttttggccaggcagctcagcaataggagcagccgcatgcttctggaagccatcttcctcctaccctgaggatgtagctagtgcaaggatctcagagaccttactagcgcttctttgaaactcctgggttctccttgatctgcaaatctgtytggcaaccaagactctaagggcccctgccttcttc

SEQ ID NO: 489 - DNA, 429 bp, Homo sapiens
ccgaggtacacagaagtttgaatcacaaaacataattaccacaataaaacacagtgttcaagtatcttggcagagcaatctgccgcacaaactgcaaattaaattaactacacagactaaaaactatacagcctaccatcaacagttgtgcattataaaaaggtagtttctttccttttgttttaagtcaggaacaggtagatttttaaaaatatatatacaagctaacacacacrgctatcagcactaatgcccccccctcaacttttcctttttcttatagaaaatggaaagcttacaatacctcstcsrtymwrgmrscagrcctwcgagccwgcctgrasagggtkwgcmktggarmagmtstgkcctgaggtttagagccgctttgtgcggggatggtggaggctagggtgggggtgagaaaag

SEQ ID NO: 490 - DNA, 532 bp, Homo sapiens
ttggattgccacacggctcacattgcatgcaagtttgctgagctgaaggaaaagattgatcgccgttctggtaaaaagctggaagatggccctaaattcttgaagtctggtgatgctgccattgttgatatggttcctggcaagcccatgtgtgttgagagcttctcagactatccacctttgggtcgctttgmgktgtgatatgagacagacagytgcggtgggtgtcatcaaagcagtggacaagaaggctgctggagccggcaaggtcaccaagtctgcccagaaagctcagaaggctaaatgaatattatccctaatacctgccaccccactcttaatcagtggtggaagaacggtctcagaactgtttgtttcaattggccatttaagtttagtagtaaaagactggttaatgataacaatgcatcgtaaaaccttcagaaggaaaggagaatgttttgtggaccactttggttttcttttttgcgtgtggcagttttaagttattagtttttaaaatcagtacctc

SEQ ID NO: 491 - DNA, 567 bp, Homo sapiens
tcgaggtacaaaagcccttcaaaaggagttcagcttttataaacaccaaaacactctctgcctgtaaaatgtttttgctgaaatttgtatcattaactctcaaatttacatcttcatgtttgagatacgcttttaggactgtctatgcatgtagactttggtcaactctctcctcctccctcaataaatcagttaacttaaaaaatatattgtgaccatttttataaaatacatgttcataaaacagatcaacatatttagcttatacagaaataaaattaagtcaatccactcacaaagaatttctattttgtaaaaatgtagcttgtatttcagtataataaaatctgatgcaaaaaacctgcccgggcggcaagtgtgctggaattctgcakatatccatcacactggcggscgctcgagcatgcatctagagggcccaattsgccctatagcggcgcattaagcgcggcgggkgtggtggwtacgcgcasygtgaccgmtacacttgccarcgccctagmgcmcgctcctttcgcwttcttcccttcctytctcgccacgttc

SEQ ID NO: 492 - DNA, 422 bp, Homo sapiens
agtgtgctggaattcgcccttggccgcccgggcaggtacaagactcaataatcacctgactgagctccaattaactgaggagaaacggggtggaggagagggctggttgctattcagacttgataatgagattgatctgtcccatggagagtgaaagttcagttccacttctgcctccttctttccatgctgtcctcatgctctttatcctcacttcctcagtcccttcaacactcaaaatctgattttatttctctctcacacgtatcaggggcagtttctgaagttgctgaggttgaattttcttcacaaacctctataaaacatcagcagagaacatataaatacattttgattagcatacattgcaaaatttctcccacaatgtcaggggatgaaagcaggtggtccccactgagagt

SEQ ID NO: 493 - DNA, 318 bp, Homo sapiens
  misc_feature 283, 311: n = A,T,C or G
agtgtgctggaattcgcccttagcggccgccctggcaggtaagctttttttttttttttttttttttgatgattaacatctttaattcaaatgkaaaagttcaatacaagccatttatagggcttgagatttgttggtcttttaaaaacaaraaatggggaaatgcaacaaaatgacctttccacttttcaaaagctttcaagtaaaggatagatcatagggccataaaagatccatttaatsaaacccacttttyaccccctaccaattgtcttacacccantccacaatcttaatacatattcctgaanatttaca

SEQ ID NO: 494 - DNA, 360 bp, Homo sapiens
accttttactacaacaagtaaacatgcataataaagtaggattcatccaatgtctgacctttctttgcatcaaaagaacatttccggccaggcacggtggctcacgcctgtaatcccagcactttgggaggccgagccaggtggatcacgaggtcaggagatcgagaccagcctggctaacatggtgaaaccctgtctctactaaaaatacaaaaatgagccgggcatggtgggggggcaccgtagtcccagctacttgagaggctgagacaggagaatggcgtgaacccggggggcggagcttgtagtgagccgagatcgcgccactgcactccagcctgggtgacagagtgagactcc

SEQ ID NO: 495 - DNA, 329 bp, Homo sapiens
  misc_feature 269: n = A,T,C or G
gaggtctgggatggggcttcactgctgtgacttcctcctgccaggggatttggggctttcttgaaagacagtccaagccctggataatgctttactttctgtgttgaagcactgttggttgtttggttagtgactgatgtaaaacggttttcttgtggggaggttacagaggctgacttcagagtggacttgtgttttttctttttaaagaggcaaggttgggctggtgctcacagctgtaatcccagcactttgaggttggctggganttcaagaccagcctggccaacatgtcagaactactaaaaataaagaaatcagccatgaaa

SEQ ID NO: 496 - DNA, 292 bp, Homo sapiens
  misc_feature 166: n = A,T,C or G
acctgggatgaggtgggtggagctttgaatctaccactatccaggccacacacctagaagctctggtttcattgtttcattgatttcattgttttgattgatgctgaccttaggcagcagagttttcaatgctctccaggtgtttctaaagtgcagacaagtttangaccgtgcttgagggtgaagggcaggactgtgatggggaggggcaaatatggggcccttggggtgcaggcaatggttttccttgacctgaatgggggtctcacaggtgttgcatatacatatacgt

SEQ ID NO: 497 - DNA, 549 bp, Homo sapiens
tcgaggtaccgaccatagagcaagaatcaagattctgctaactcctgcacagccccgtcctcttcctttctgctagcctggctaaatctgctcattatttcagaggggaagcctagcaaactaagagtgataagggccctactacactggcttttttaggcttagagacagaaactttagcattggcccagtagtggcttctagctctaaatgtttgccccgccatccctttccacagtatgcttcttccctcctcccctgtctctggctgtctcgagcagtctagaagagtgcatctccagcctatgaaacagctgggtctttggccataagaagtaaagatttgaagacagaaggaagaaactcaggagtaagcttctagcccccttcagcttctacacccttcggccctctctccattgcctgcaccccaccccagccactcaactcctgcttgtttttcctttggccatgggaaggtttaccagtagaatccttgctaggttgatgtgggccatacattcctttaataaaccattgtgtacctgc

SEQ ID NO: 498 - DNA, 412 bp, Homo sapiens
cttgaagctgggaggtggaggttgcagtgagccgagatcacaccactgtactccagcctgggcaagagaatgaaactctgtctcaaaaacaaaaataaaaacaaaaaaaaaactcttgtcattctggaaatgtccacaattcagtcttcacctgcctccatcctcatgaaggcaccaggggagcgcggtgggctcacctgatttcttggttaggtctgttctgttccttttttatgcggggtctgtcggtgggcactgctccaatgtgaggggtccaggctccatcgtagcctcttaaccagctcagtgccaggaagggtggactttgacaaaaacccacctcaaatctgcactccccaacctggagtgcaacctgtggcaagctccctaggctctctgggcctcagcttcc

SEQ ID NO: 499 - DNA, 447 bp, Homo sapiens
acttttaagaatatactttgatttaatatgtatgttagtaaaactccacgtgttgtaaccattattatgtttttgtttttaaaatggggatgtaatactaataaccactacctataaaataaagcacacaattgttccggcgattttacaaatctttttttccaggtgtaaagtctacaaaaattccaaaaaattagagaacactgaaaacatattaaagtttgacatccaactttatagtatttccatgttaccctgaaagataacttaaaaaatatggccttcttagaacaggccactctgctattataaaaaattggtgacagcaagaaattgtatcactgatatgtggaatttttgtaaatagttttctctccaaatcattagaaaaatgttcaaaaataaaaacaaaataaaatatggtggtggtccctaaactattttgaa

SEQ ID NO: 500 - DNA, 527 bp, Homo sapiens
gtttgcttcttgcatctgattaactagaatatttctctttcccccttttaatttgtgatgtcacttgaccccatttatgtgtaggagcactacaccattggtttccaatactgcacacataagatacatacttgtgtgcagaaagtatcttcctccaggcttgtaatacccttcacatggaagattaatgagggaaatctttatattctgtataaaaacaaaagcaaatttatatactaaaatcatttgtctaaaaatttaagttgttttcaaataaaaattaaaatgcatttctgatatgcactgattgtgttgcctccagctttttttgctctctatgagtgactacttaagtcacttgttgagagggattatttactaattatatacttctcattcctgtaactccattccctttaaacagtggtgatatcaaatatacttccatccattgaatggggtatttttaacaacaacaaaagtgatatactaaaaaatgtattgcttaaggcttattgaatcatttt

SEQ ID NO: 501 - DNA, 304 bp, Homo sapiens
gaggttgccgaccaaagagaccattgagcaggagaagcggagtgaaatttcctaagatcctggaggatttcctacccccgtcctcttcgagaccccagtcgtgatgtggaggaagagccacctgcaagatggacacgagccacaagctgcactgtgaacctgggcactccgcgccgatgccaccggcctgtgggtctctgaagggacccccccccaatcggactgccaaattctccggtttgccccgggatattatagaaaattatttgtatgaataatgaaaataaaacacacctcgtggcaa

SEQ ID NO: 502 - DNA, 425 bp, Homo sapiens
actgattgtcatcctgactttggcattggcagctcttatattccgacgaatatatctggcaaacgaatacatatttgactttgagttataatatggttttgtgacttatgagctgtgactcaactgcttcattaaacattctgcattgggtataatctaagaattgtttacaaaaagattattttgtatttacccttcattcctttttttgatccttgtaagtttagtataaatatatctagacattcagactgtgtctagcagttacgtcctgcttaaagggactagaagtcaaagttccttgtctcactatttgatctgctttgcagggaaataacttgttttttctcatgtttcatcttctttttatgtaaatttgtaatactttcctatattgccctttgaaatttttggataaaagatga

SEQ ID NO: 503 - DNA, 256 bp, Homo sapiens
  misc_feature 224: n = A,T,C or G
accagcagtgtgtcaggtgctgcagagcgttcttggagaaggcccactgaggcaggttcgtgccctgctgcggccagcctgactagaccccaccctgaggtcctgcatttctcagtcggtgtgtaatcacgttccagggcccaaagcccagctctttgttcagttgacttactgtttcttaccttaaaaagtaattgtagatggaaatcagttgtgtttggcangagaatcaataaaaatctttgattcagacagc

SEQ ID NO: 504 - DNA, 255 bp, Homo sapiens
  misc_feature 166: n = A,T,C or G
actgttaatgatgttaatgatttttttttaaactcatatattgggattttcaccaaaataatgcttttgaaaaaaagaaaaaaaaacggatatattgagaatcaaagtagaagttttaggaatgcaaaataagtcatcttgcatacagggagtggttaagtaaggnttcatcacccatttagcactgcttttctgaagacttcagttttgytaaggagatttaggttktactgctttgactggtgggcctctasa

SEQ ID NO: 505 - DNA, 485 bp, Homo sapiens
  misc_feature 70, 180: n = A,T,C or G
agcttggtccgagctckgatcccctagwaacgccgccagtgtgctggagaattcccccttagcgtggtcnttgcccgaggtacagaaaacccaaaggcaaccacatagcatatgtaaaatgtgcaaatcactttaaaatgcaagttattctatagcatttgcaagatagaatttcactgnaattagggaatctagttcatcctaacttaatagtcttttgcatgtatagacaatgcaattctacaaggcacaactcagcgttgatgctaaagtatgaaacacatcctcagattatttatttgaaaatattaaaatagcatcgtttattattttttaatgagtcatgagctcatttctaaagcttcataaagcattacactgataacatatgtgtggtcaggacaaactgttccctgaacttaagaggtgaaggacaagaccccatattattatcctgtattaaaaaaggaaatatacatatatgt

SEQ ID NO: 506 - DNA, 230 bp, Homo sapiens
acaactccaaaaggagacattggagaagaaccaagctgggtctataaggaattgcacatgagatggcacacatatttatgctgtctgaaggtcacgatcatgttaccatatcaagctgaaaatgtcaccactatctggagatttcgacgtgttttcctctctgaatctgttatgaacacgttggttggctggattcagtaataaatatgtaaggcctttctttttaaaaa

SEQ ID NO: 507 - DNA, 179 bp, Homo sapiens
acctacttctccacaccgctgttgcttgggaaaaagggcatcgagaagaacctgggcatcggcaaactctcctcttttgaggagaagatgatctcggatgccatccccgagctgaaggcctccatcaagaagggggamtatccsgtgaacaccctgaaaagakccgctgtgacgggtgg

SEQ ID NO: 508 - DNA, 321 bp, Homo sapiens
acagagttttatataaatttaaaccaatttttaaaacaaaactgcggacaccaccataaaaatggaatcaaaagaaagttaatttatgaaattaagaggtcagcagaatatactcagtgatggaagacacttgggaaagtctttttaatagaacaagaacgatcttaatttaagaatattatcctggtttaacaacagtgccctgtttacaacagattgtgccctatctcatctgcagccgaggaataaaggattctgattagaaagagggttgcctacagattagtaagcaattccttggatcttatgcacagaacttgt

SEQ ID NO: 509 - DNA, 176 bp, Homo sapiens
acgtgggatacgggtcatgggcagagctcctggcctcagtgatgcctcctgatctatccataggcctggaagatcagcactgggatgacgatgagcagaatggtcatgaggatgcccasaatcagggcccacatgttcaggcacttggccggtggatgcatargcctgggcccctg

SEQ ID NO: 510 - DNA, 298 bp, Homo sapiens
  misc_feature 246: n = A,T,C or G
accaactttatatcatatgtttatacaatttaatttaaaaattcattttaaggaagacagataatttgaaagacttttgtttttcttgacttaattcatgaagtatcattttttgactgagtctccatttacttcattcttaatgattattgtcatccctttaaatctgtgcctttttcttcttgagcgaagctgtttgagtaaacctgttgaagagtgtttgtgtcttttgtgcttttttgttgntattaaaacaccaactaaaccttatagtcaagacaaggctctatgtttctgt

SEQ ID NO: 511 - DNA, 345 bp, Homo sapiens
acagatttttgtatagctgataagattctctgtagagaaaatacttttaaaaaatgcaggttgtagctttttgatgggctactcatacagttagattttacagcttctgatgttgaatgttcctaaatatttaatggtttttttaatttcttgtgtatggtagcacagcaaacttgtaggaattagtatcaatagtaaattttgggttttttaggatgttgcatttcgtttttttaaaaaaaattttgtaataaaattatgtatattatttctattgtctttgtcttaatatgctaagttaattttcactttaaaaaagccatttgaagacctaaaaaaaaaaaa

SEQ ID NO: 512 - DNA, 459 bp, Homo sapiens
acttatttcaacaattcttagagatgctagctagtgttgaagctaaaaatagctttatttatgctgaattgtgatttttttatgccaaaatttttttagttctaatcattgatgatagcttggaaataaataattatgccatggcatttgacagttcattattcctataagaattaaattgagtttagagagaatggtggtgttgagctgattattaacagttactgaaatcaaatatttatttgttacattattccatttgtattttaggtttccttttacattctttttatatgcattctgacattacatattttttaagactatggaaataatttaaagatttaagctctggtggatgattatctgctaagtaagtctgaaaatgtaatattttgataatactgtaatatacctgtcacacaaatgcttttctaatgttttaaccttgagtattgc

SEQ ID NO: 513 - DNA, 422 bp, Homo sapiens
gccccgtagtgatgagcactgactggttcactggccacattttagttcttcataataataggccacaaaagggctctgtggtttgcctccatgtgcactggcccctccccacccctagggggcactcagtagctgctgagaaggcctgtccacgaggctgttggaacccctccaataaatacttagaggtagtgtatctgatgcttgttttcgtggagaaaattgtattggagaacttaaaacatcacgaatatttttaataggatccgcagacacccaaaggagaagcttggtcttttccaggtatttccaacttgagttcagcccaaagcctttgaaaggaatgcattaccacatgaccacatgctgagaccccatggggtctaacacgggacctaagaaagtctctgcagccagatagt

SEQ ID NO: 514 - DNA, 326 bp, Homo sapiens
accagtatagtaatatctgtatactaactagggctttgtattgtcaataattttttaataattttttaatgaggtatttaccactgaagaaatatgataatataaaaccatcaaattttataattgagatgatactctggaaaaacatgtcatttcattttcagaaaactcttaagctctcttcagtctctgtaatgtttctgattgcatgtttcttcatgaaaagtatgttgttgttttgatagtaataataataaatgtaggctcagttctttcccaggattttcatcaaaaagctttaagtgcctaaccctgcttgtctctgt

SEQ ID NO: 515 - DNA, 323 bp, Homo sapiens
accagatgtagctaggaaaacccaaacgttccttggatcctgagacagctggtaagcacccaggccggctagactgccaaagagcagccctgcagccagggacggcacgctgcctgcttttacatagccaatgatcccaccagaagcaaccagtgctgcgtagccaaagccaaaccaatgcaagggcactactgagccagtgtcctgcatttttctcttctctgtccagacaggagactaccccaggcctgcaccggtctcacgaaggccccggctgtctacaagggcgcgcaagccgcaggaatgactgcgaggtgtcgccg

SEQ ID NO: 516 - DNA, 403 bp, Homo sapiens
accccgttggggttcatttcctgcccaagaagctggatgaggcagtggctgaagcccacctgggcaagctgaatgtgaagttgaccaagctaactgagaagcaagcccagtacttctaaatactgagtgaatacatcacagattgcataaagtgcatgattgcaagttgttgtcatccattcagctttctctgtctgttgttctggcaatttcatattgtcaaagattctgaaaacaattctaaataaatcctgccaccagtgtttctcataagtgtggccatatgttttcattatttcaaacattactgttaaacccctggttcttacatctaatttgcatctattgatgatacaggataactcaaagagaattgggaaccatcctctcacccacaccctgt

SEQ ID NO: 517 - DNA, 360 bp, Homo sapiens
  misc_feature 335: n = A,T,C or G
acctgaacgaagtcgcgggcaagcatggcgtgggccgtattgacatcgtggagaaccgcttcattggaatgaagtcccgaggtatctacgagaccccagcaggcaccatcctttaccatgctcatttagacatcgaggccttcaccatggaccgggaagtgcacaaaatcmaacaaggcctgggcttgaaatttgctgagctggtgtataccggcttctggcacagccctgagtgtgaatttgtccgccactacatcgccaagtcccaggagcgagtggaagggaaagtgcatgtgtccgtcctcaggggccaggtgtacctgmccgggcggccnctaacggcgaattmtgcagatatcc

SEQ ID NO: 518 - DNA, 255 bp, Homo sapiens
cataaatattatactagcatttaccatctcacttctaggaatactagtatatcgctcacacctcatatcctccctactatgcctagaaggaataatactatcgctgttcattatagctactctcataaccctcaacacccactccctcttagccaatattgtgcctattgccatactagtctttgccgcctgcgaagcagcggtgggcctagccctactagtctcaatctccaacacatatggcctagactacgt

SEQ ID NO: 519 - DNA, 449 bp, Homo sapiens
accttcctctcaattttgctgtgaacctgaaatggctttaaattaatactcttattttttatttaatttaattacataaattaaaccttaccatgaccaaattgtgttaggacggcctgctatctacagcacagtgtgtcatttgcagatttgtggttacctataccacgctaggtgttttgacatgtttagtatttctgctttacagtgctgaattccatattttagaagctatgaaagtccttttatgaaaaagttactgattgcttctcagttattaggaaaacagttgtttcacaattattatgtagatatgatgcccaaatatcatttttagtatatcttgtcgatctttaagttgttactattgtgttattcatgtctttaaatcagataccaaatattttttaggaaagaaaaatgttattactgtcattaggttggctttt

SEQ ID NO: 520 - DNA, 92 bp, Homo sapiens
acccccatcacagcagtcaaacagcctgagaaagtggcagctaccaggcaggagatcttccaggagcagtyggcaryagggccagagatccg

SEQ ID NO: 521 - DNA, 123 bp, Homo sapiens
acagaggggacaacaatgaatcagaacagatgctgagccataggtctaaataggatcctggaggctgcctgctgtgctgggaggtataggggtcctgggggcaggccagggcagttgacaggt

SEQ ID NO: 522 - DNA, 303 bp, Homo sapiens
  misc_feature 277, 284: n = A,T,C or G
acaaaaaaatgaatgttacaaaaatcacgtaaaaaaaactaggctcaaggaagcagccgcccttgcaagagggctcaaggcacctgagaggctgagaagaggccaacctggccatgggcgtggctgcatggacagctcttccctcctgcccttccccagatgcccttccctcctgccccgaggggcacactccctctccccaattacaggtgctacaaaactgccttgaataccaccgccaaggcactgccagagatgaaatgggccctgagcagangcctcangctctccctcccccgtagc

SEQ ID NO: 523 - DNA, 424 bp, Homo sapiens
acagtgcatggtgctgtcacttggaaagcctttcaatgttgtcttcagattgttgtgatgaatatgaaacatgcagaccctcctttataaagaaaaagaccttaaaacttgaatatgagataattttacattttaaaagtttatttgattttcatattattcactttcaaagccctttcaaatagaaaaggtatgaacttttggggggataatttatgtatcgtaaacttattagaacaaaatattcctgatgtataatgagttgttttatttatacaactttttcaatggtagtttgcactattctttattatgctacaggtttatttattatgaaacaaaggaatatgtattttatgtattttaccatgcataggttaactctttgccacagatttattggtcttgatacacctaaaataaa

SEQ ID NO: 524 - DNA, 172 bp, Homo sapiens
acaatttcattgcagacacaaagacttaagagtttcaaagaattttttaaaataaaaaaaaaatttgcacttattcctcacaaaatcttcacttttggaactatcccaattgaagctacacactgaatttattaatacagcattaagtttctttgtgtaaaaaaatctttgt

SEQ ID NO: 525 - DNA, 256 bp, Homo sapiens
actccttcccagttttttctttatactgagccttcagggacagtaagcattctacagcttcatttattttagccttaggggatttttcagcttttagcttacgaaccacctccccttgtgcagcaacttcatcatacagagatttactttccagaatacttgctgaggaattagaagaaatattctgtcctatttcagcaggagggtttccaggtttatattcctggccagttttctccttatattcaagctttca

SEQ ID NO: 526 - DNA, 479 bp, Homo sapiens
actggagatgtatttgataaccaaggttttaggtaaattttcaccagtattagttctatttgcaaactgaaaaatgttgtaggcttaatataaaataaccacattagtgaacattatatctcttagaagaaaggccatattttgctcctgcttctgtaaaaatattatttgtttgaaggggaaataatggtagtgtgacctttcacttaattcctactcccttaatgtgagagagacaaaatgagctgaagaaggaaaattctggagttacactccacaaccttgaacatactgacggacatctctgttttgacaacgatttctccatgccacccatgctctaatgccttgtggatcacggacaaccctctttgcacaagctacagcatcagcgatgttatcttgcagcaaagcactgcaggataaatgacaggcattaactgctcctggggttttgccatcattacaccagtagcggc

SEQ ID NO: 527 - DNA, 220 bp, Homo sapiens
accaaattgaagggtttagaggccctcaaatgggcatcactcataaaggcaattttcatggtttaatatagaaattactctaatgtgagaacacaacatgggaactattcaaaatacacctttctatgcaaaattgagtttgyatctattttagcattttaaatgagcactctgcaactgagaccaaatatcaatcatctcttgaggttttctactatgt

SEQ ID NO: 528 - DNA, 373 bp, Homo sapiens
acamcatcgatgaaattcagacatacaatgtaaagttgaaataatcccaaattattttacattatttatgtatactttacaaataacacaaatatggaaatgttttcttggaaagctgttggaactgtaagcactgcaacgtatgaaagaaacatatttagcaataaaaaatttaataatatcctacaactgaattagttgcatatttataccattcaaaatcttgattttaacctcattcactcctttgaaaaatacattcctcttttgttcttttaaatgcaaaattagtggcagttgcagcaaaaacgccgaaattctataagaaaaaaactgatttaccccaaacatatcattcagcacaaactgcggt

SEQ ID NO: 529 - DNA, 344 bp, Homo sapiens
acatttctaagtcaaacacttgtgacttttgctttaattccatgaatgttcctgcctccttgatatttgtatttattctttttttctctagagtagaggtataattgtgtgatatttcagaaatacagataaatgattcaaaaagtcacagttaaggagaatcatgtttctttgatcatgaataactgattagtaagtcttgcctatattttcctgatagcatatgacaaatgtttctaaggtaacaagatgagaacagataaagattgtgtggtgttttggatttggagagaaatattttaatttttaaatgcagttacaaattataatgtattcatatttgt

SEQ ID NO: 530 - DNA, 354 bp, Homo sapiens
accattgctctttcctagctaaccctagatatggcagctctttaatgtacctgagatcctggtgcacaacatagtgatcttcatgcgaacttcagtgaagatttcatacattggcctcatgacccagagctccttggagacacatcactatgtggattgtggaggaaattccacagctatttaacaactgctattggttcttccacacagcgcctgtagaagagagcacagcatatgttcccaaggcctgagttctggacctacccccacgtggtgtaagcagaggaggaattggttcacttaactcccagcaaacatcctcctgccacttaggaggaaacacctccctatggt

SEQ ID NO: 531 - DNA, 418 bp, Homo sapiens
acacatcccatcttcaaatttaaaatcatattgtcagttgtccaaagcagcttgaatttaaagtttgtgctataaaattgtgcaaatatgttaaggattgagacccaccaatgcactactgtaatatttcgcttcctaaatttcttccacctacagataatagacaacaagtctgagaaactaaggctaaccaaacttagatataaatcctaccaataaaatttttcagttttaagttttacagtttgatttaaaaacaaaacagaaacaaatttcaaaataaatcacatcttctcttaaaacttggcaaacccttccctaactgtccaagtatgagcatacactgccactggctttagatactccaattaaatgcactactctttcactggtctgaatgaagtatggtgaaacaagt

SEQ ID NO: 532 - DNA, 583 bp, Homo sapiens
  misc_feature 497, 498: n = A,T,C or G
cgtcccaacaattatattactaccactgacatgaccttccaaaaaacacataatttgaatcaacacaaccacccacagcctaattattagcatcatccctctactattttttaaccaaatcaacaacaacctatttagctgttccccaaccttttcctccgaccccctaacaacccccctcctaatactaactacctgactcctacccctcacaatcatggcaagccaacgccacttatccagtgaaccactatcacgaaaaaaactctacctctctatactaatctccctacaaatctccttaattataacattcacagccacagaactaatcatattttatatcttcttcgaaaccacacttatccccaccttggctatcatcacccgatgaggcaaccagccagaacgcctgaacgcaggcacatacttcctattctacaccctagtaggctcccttcccctacccatcgcgactgatttcactcacaacaccnntaggctcactaaacattctactactcactctcactgcccaagaactatcaaacttcctggccaacaacttatatgactagcttac

SEQ ID NO: 533 - DNA, 529 bp, Homo sapiens
gaggtacttaataaccaagtctcggaacactgagccatcacctgcaatgtttcctagagcccagacagcttgttcactgatgtgagcatggggagatgccaacagagaaatgaatgctgggatggcacctccatctaccacagccttggtttgttctgatgtcccagaagcaatgttagtgagtgcccaagcagattcaaactgaatgggactacaatcagttctgcccaagaaggacacaaatttcggaatcaaaccagcccggattatgttgtctatggggggctgtttttctctggaaagtagtttcctggcagcttgagtagcttggagctgattttccacattgctgctatttatgcctttgacaatgtcatcaacagaccaatttacagtgccctggttgttgcggttttcctgcagcggagaagtagcatcatcaggaaatgagcttacatttctcctcttcagcatctggtcatccttcttagctttcctcagctccacattgacctctattctgcgacgc

SEQ ID NO: 534 - DNA, 297 bp, Homo sapiens
actcattaatattattttgttttgagaaagccagaaatgattctaagaaataaacaataataataaaagatgtaattaatatactgtatcccttttaagccaaagcacactttttacctcaagactgttctgacttttacattcttaatttcctttgtccaaaataggaccccattttaaatagagttcatttgaattgagttcataatctaaagtcacttttccccacaagatgttttcatttcagtatataaactgctaagcggcaaatgactaagtcagttataaagaatttgt

SEQ ID NO: 535 - DNA, 373 bp, Homo sapiens
actttccagggcacagcctggacgaatgatgccaaactttccgggcacagacaaatcaaccacagttgagccaaggcgacactcggggctctggccatccccaatttgtcccccatcaataaccaaggacaactgaggccagagatcctggaactcctcgacattcagagaactggcctgggagctgaggttggcactagtgagagcaagcggaccctcaaacatctgagccaagtcttgcataaaagcatgatcaggaatccgaatgcctacaagaggcgtaaaagggtttaggtccttgttgagctcctccgagcgttccatcaccagggtcactggtcctggcagtaggtctttcaggagcccctcaggt

SEQ ID NO: 536 - DNA, 254 bp, Homo sapiens
acatgctccattaaattaaatgtcatccaacatttatcaaatattgtcttagttacagcttgatacctatctaaattcatattcgagcaaaactaggccccgaaagtgcgtttgtggctctgcacctccagaagtgagttcaaaaaacctgcagctcatcagaactgcaacaataactcttaatattttcttgtgacaaaaaaaaaaatcaagtttacttcaatatattttcaaatatttactggaagtaatgt

SEQ ID NO: 537 - DNA, 449 bp, Homo sapiens
acagacttgtttttgagtgttgagtagcagggacaaaataagggaatgttattttttaagaaaattcattttcattgttgtctccttccttttctgtgaaagtcctcatactgagaaatttgtatattttatattaaatcacttactattgatttttgttgtgattttcaaaggtggattcccacagataaaatcttggctattgcccaaaacatagtaaagggtcacgtgtgactttttataataggaagaaaattctgcctttgtgagtgcacatgtccacatttcatccctccttccctcaaaaccctagagaggggcattaaagaattgttgatgtatatgcaatgtctgttaagcatgcactatgtatttcatcctcatttattgggtctgggactgaagtttttagccagcatggacctaacctactttttgggataaaattc

SEQ ID NO: 538 - DNA, 328 bp, Homo sapiens
actcagcgccagcatcgccccacttgattttggagggatctcgctcctggaagatggtgatgggatttccattgatgacaagcttcccgttctcagccttgacggtgccatggaatttgccatgggtggaatcatattggaacatgtaaaccatgtagttgaggtcaatgaaggggtcattgatggcaacaatatccactttaccagagttaaaagcagccctggtgaccaggcgcccaatacgaccaaatccgttgactccgaccttcaccttccccatggtgtctgagcgatgtggctcggctggcgacgcaaaagaagatgcggc

SEQ ID NO: 539 - DNA, 506 bp, Homo sapiens
tcgaggtactttggcctctctgggatagaagttattcagcaggcacacaacagaggcagttccagatttcaactgctcatcagatggcgggaagatgaagacagatggtgcagccacagttcttttgatgtccaccttggtcccctggccgaacgtccagcggagagactgttggcagtaataaatggcaaaatcatcaggctgcaggctgctgatggtgagagtgaattctgtcccagatccactgccgctgaaccttgatgggaccccactatgtaaagtagacgccttatagatcaggagattaggggctttccctggcttctgctgataccaggccaaccaattattaatattctgactggcccggcaagtgatggtgactctgtctcctacagatgcagacagggtggaaggagattgggtcatctggatgtcacatttggcacctgggagccagagcaagcaggagccccaggagctgagcggggaccctcatgtccatg

SEQ ID NO: 540 - DNA, 519 bp, Homo sapiens
tcgaggtacctttccttgtttcctagaattcctaaggaggaacaacaacaaaatcggggtttgttcagcaattgcaccacatctctaaaaattaaaacattattcagtaagtgaaggtttctgataaacaagtggatcaaactgaatatttccaattaagaaagttcacaataatacagtagtgtattattaccaataggaaggcctaatagtcgactattattttttaaggcaagaaaaaagaaaacaagtgcaagctatgccaagctttggtgaatgctgtccttggcattgcaagtataaagtttgtttaaaaagaaaagggaaaaattaaactaatgcttcaacaaccacagaataaggtttaggactgcaaagaaagaggaaaaaaagaaacattattcctctccaattatactgccaagcattcacaagtgagctagggatcataaggttaattatacatttaataaggtgtcagggagataactgctcatttctttataaaaattaaaatgt

SEQ ID NO: 541 - DNA, 431 bp, Homo sapiens
acttgaggcttttttgttttaattgagaaaagactttgcaatttttttttaggatgagcctctcctagacttgacctagaatattacatattcctccagtaagtaatactgaagagcaaaagagaggcaggattggggtcacagccgcttcttcagcatggaccaagtgggccttggggattgcagcgttctcgaagtggctgtaggactcgaatttacagaaagccacagaggtgcaacttgaggctctgctagcaagccaccagtgaggctattgggtaaccacctttctatacaggagattggaatctactttgtcatttatccaccacagtgacaaaggaaaagtggtgccgttatgcaatccatttaactcataaacatattactctgagtaactggccagccattcatcggatccttcattgggt

SEQ ID NO: 542 - DNA, 502 bp, Homo sapiens
acaaaaaaggaaataagaaagtagtgacagcctatccatacaaaaatcaaaaagacacaaaggaagatagaatgagaaacagacctacaagaatcattaaacaataaaataacagtaatctttgtcttcagaaaataaatattttaaaaatagacttgccaatcaatacacatacattgaatagagggattatataaaattttatataccaagatccaacttgcctctcttcaagagtcacttgagatctagtagtgaaatcagcctgaaagtggcaagtggaagaagacattttaggcaaacatcaaccaaacgagagcagaagagatcaaaattgtattatacaaaatacatcgtaagtcaacaactctcttattttataaaatatactttatgtcaaaattcacaagagaaaaaaggtcattaaacaataataaagatatcatttattgaaaatgtatgacaaatatgtgcatacatatatttatatgtttgtgtctgt

SEQ ID NO: 543 - DNA, 452 bp, Homo sapiens
  misc_feature 403: n = A,T,C or G
actacaagggcagtaaaacaatgatacactggaaaaaaaaaaatgcagcaataaacatttgttaaaaagactgatagaataaataaaactacaaaaaaaaaaaaatcatacaaacccattctgaaaccccaagaagtcctggaatacagaaatgccctcctccttcactatttcacaggaagcactgcaggctatttgcttaatattgtcctgggattacattctaaaattagtaactggttacagctcggttgtagtgcacaattaaaatcacactaacttcatctgaagtgtcattctacagttttatttacacaaccagtgaagggcatgttctagaataccagctttaatccttttcaaacattaatataagaagccaaattgtaatgatacagcaaantgaggccactggtattaatacaggtagcaaaggtccacatccaggtggt

SEQ ID NO: 544 - DNA, 472 bp, Homo sapiens
caatcatttataatagaaacaccttgaccacaagcccttgattgaacattttataatatttcatctacttattaaaacaaataatttcccttgggttggaggggaggtgatttcataaattaattagaaagccatctttagcatattgcttatgtctggatccatgtttctgaggaaaaagacattctcaggtgatgtatttttttcatgcattagtatgcatttttaaaaaataatgcatgtttctttaataattaattttcatcttctataagatgccatgtgaagaagttgtggaaatgtagaataaaaagctaaagctgccaaatttctgttgaactcttaaaaacagctcatgtttgtttgtcctctcgggttgtggcctagcctatttgcaatgtaatgaagctgcagggttcttgtatagctaaagcgttcaatgcatttcacgtgctgtggtggatgtgggtgc

SEQ ID NO: 545 - DNA, 281 bp, Homo sapiens
  misc_feature 180: n = A,T,C or G
acttaagcatttccacttttggaagaaaagtgtattagtattttatattgcatttcatttaaaaggacagttttttttttttttgtaaatccattcattgaaatggtttctaaactgtataatgtaatttggagcctatttagtaatatgaattaaatgtcctatgtagtgctacaattntygaattagaaagtgatcaaatgtmasaaaaaaattyaaaaattcagcccagaaaacaaaatagggtattaaattagtttaatgtaaaaggaattwataag

SEQ ID NO: 546 - DNA, 423 bp, Homo sapiens
tcgaggtactgagacagaagattgtgtctacataagcacaagttgtaacatttcacaacttctaaaaggaatgtcaacaattacaacgatcatgcataccatggtcgataatcacattttagaagcattttcaaccatttctaaagaaatgcttataacattgttatatatagaactactttcaataaactgcaaaacattgatcgacttttccagtatgagctacagtgtcaacacaaaagggaggcataaatgtttaatttatgaaatcagaatggaatatttactgtaaagaaaaattaaaaagctttcaaataaaggccattatcgaaccaacgtgaagagcacaactcgaacttttgagttcattcatcttttaaagctgtcctctcaataacttcagttctaagcactgaattcagt

SEQ ID NO: 547 - DNA, 399 bp, Homo sapiens
gaggtcttttagcaggtctcaaaagttttcttctaataraywtcttggtgttctatcattcgtaggtgttgaatttaccaaactttttctatttcaattattacatttttactttgttcaagtaatattgtatcatattaaatgaacattgcattgtgaaaataccctgcttagtcatggtatgtaatcatccttatacctttttgtattctttttttaaatatttctgagaatttctgtgtctaaatttaaataggatgttgttttgtaatcatcttgtgattcttttgtctcctttgggtattattggccaatagatgaattaagaaatgttacctcttctactgcttgaagtttttgtgagaaattgatgtttttcattaagtgttgatgaaatgt

SEQ ID NO: 548 - DNA, 246 bp, Homo sapiens
aaatgcattataaatgtttttaattgtgttctgttttttgcagtctttaagtgccatgccaattgttcttatattctatagaagttcgctcaaaatactcaacaggggaataggcagcggacagtcagaatggttggaattttggctttctaagaaaaactttattttgcataagcatgtggtcagatcattttgtgcatatgcagcctggattggatgttaagtaaatgcttgttcagtgccggt

SEQ ID NO: 549 - DNA, 413 bp, Homo sapiens
acaaactggtattttatactgttccaatgccagtaatcaatttattttcttcattaaaataatatacacagaatgtattgttagttcgattccttcaaattttatacatatttactttctgttaaagagaaaaggataaaatggtataaaaaaagataaagctattaattaagcacgagagagaagataaatggatattttccctgtgtgaggctaagacagaagcaaatctcgttaagaaaaatgccacccacacaacaggaaatttatccaaaacaaaacaaaagcagttatagaaccccttctctaccatcagaagtaatttcacagcaataaacttattggttacaacagacatacttgaacagttaaggatgggaagaaaggcttaagatatcaccaaattaaaccgt

SEQ ID NO: 550 - DNA, 215 bp, Homo sapiens
acataaggttcaaagtttcctttcctttttttatttattttatattttgcaatgttttttttccataatatttaagtttttcgatgtttagatatttttcttcggtgaagcacaagtwtcttttcatggyccctgakcaattttaaacagttggaacaccggtggcactgataactgctytctgggcagcctctttagcttggggggctbgtagg

SEQ ID NO: 551 - DNA, 175 bp, Homo sapiens
  misc_feature 154: n = A,T,C or G
ggcggaggagcggtaactaccccggctgcgcacagctcggcgctccttcccgctccctcacacaccggcctcagcccgcaccggcagtasaagatggtgaaagaaacaacttactacgatgttttgggggtyaaacccaatgctactcatgaanaattgaaaaaygcttatmmga

SEQ ID NO: 552 - DNA, 298 bp, Homo sapiens
acagtgtatactatccccaccaaaggaaaaaaacattaagagcaaaacaaggggtggggggtgggaatattgctaaagaaaattctaataagagttatctataattatagcttttatttattatatcttcattcaatcatttattcacaattagtctaattgcattcttgatgaataactgacttcagcaaaggagtcaatccactaagcaaagttcatttatttttcatgatgttcttctttcgatcttgagtctttactctcctggattcccaagagaactgcattagcctctagt

SEQ ID NO: 553 - DNA, 437 bp, Homo sapiens
yacaatggcttaagcaaatcgctttagttttttttctatttaagatttaggacagactactcgtctaaaattcactatttacagagaaggtcctagggaacaggataacttatttaggtttagctctcataatacaatatccataatggctttagaagaatgtaaataaataacattggtaaacagcgtatactgatattttctgacaaactcatttatctaacatcatgctgagcaatcaagaggattcctctatatattttaaattttaatttattctatttcctgattcacaaactcttgctccatgttaaagcagttatcaccaatagaacctatgagaaccagtgcccatggaaacctaacagcttgtttttttaatcccctattaaaactcggttgaacttgatatatgcatggttgaaatatgcgtgggt

SEQ ID NO: 554 - DNA, 575 bp, Homo sapiens
ycgaggtacttttgacaacatttatctgcatgtccagatcagcaatgagtcggcaattgacttctacaggaagtttggctttgagattattgagacaaagaagaactactataagaggatagagcccgcagatgctcatgtgctgcagaaaaacctcaaagttccttctggtcagaatgcagatgtgcaaaagacagacaactgaacaaattacaaatgaactttcttgcacttgcttgtcgccaaataaaagagaggcccattgattcctcccccaccccaacacttttcttttaaagcttttctccctccttgttcttgtttttctttcttcctttccttttctctgagagttttaatactttcaaggactttaaaaaaataatcatgtttgaattgttttctcttatttttgtgaggtggtttgaaggaaggacaaggtagatctgtttagttttgcagttgaagttagatggtcctaaacatttaattgtcaaataatttcaaatttaatgtcctgctttcacattgaagggcagagcctacaaaacattgtatatttcaaaagacaaaaa

SEQ ID NO: 555 - DNA, 226 bp, Homo sapiens
accgaaccatgaccacccctggcaagagccttcatgcacctagcaagtagtcacagcatgcatgtgcctagaattgttacgtggtcaaattatattattgtgtattcccaccaacagtatgagaaggtccacttctccatacctccacaactctgggcatctaaaacttttaaaatcctggaatcataggcaaaaaaaaaaaaattcacccatattttcctctagt

SEQ ID NO: 556 - DNA, 298 bp, Homo sapiens
acttcatataagtggaatcatatagtatttgtccttttctgtctggcttatttcacatataatgtcttccaggttcatcatattgtagcacatgtcagaatttcattcctttttaaggctgaataatattccattatgtgtataccacattttgtttatccattcatccatcaatagacatttgggtatttccaggacaatatattcttaatttaatcccacattttaagacttacaggtaatttaaattcaattcaacttactgagtatttactaagggtaactcactatgggaagt

SEQ ID NO: 557 - DNA, 166 bp, Homo sapiens
actaatggtctacatccgattcaaaaccacatagttcattgatcacagatgcatggtattagtcacgaaagtttcagaacacattgtgttgattttgaaaggtcatttgcatcttctatgatttcaactttatctccatttaacttgcttgtaaagtatgtatgat

SEQ ID NO: 558 - DNA, 461 bp, Homo sapiens
  misc_feature 448: n = A,T,C or G
actccctgttttgagaaactttcttgaagaacaccatagcatgctggttgtagttggtgctcaccactcggacgaggtaactcgttaatccagggtaactcttaatgttacccagcgtgaactcgccgggctggcaacctggaacaaaagtcctgatccagtagtcacacttctttttcctaaacaggacggaggtgacattgtagctcttgtcttctttcagctcatagatggtggcatacatcttttgcgggtctttgtcttctctgagaattgcattccctgccaggcctaccacataccacttcccctggaattggttgtcctggaagttctgctgcagagggaccttgctcagaggtggggctgggatcaggtctgaggtggagtcctgggcctgggcatgcagagcccccaacagggctaggcccagccacaggagacctangggcatgatttca

SEQ ID NO: 559 - DNA, 193 bp, Homo sapiens
accagacagaatcaggaaaaaaaaattgaaaataagcataacactataaagaaaacttggaaaagtgaaacacttctaaataaaaaatatacacctggcctggcacccattacatatatacataatacatgttataaacatatatacagtaaatgttttggtagcaatacagaccatgcattggtctttgtgt

SEQ ID NO: 560 - DNA, 125 bp, Homo sapiens
acacaattattctcactctccacagaaaggctgcttaacttctcatctggwggwggsaagcactaaaatcctgattttaacagaatagtagkaaaaatgcctcagtgatttaagttgaaagcagt

SEQ ID NO: 561 - DNA, 325 bp, Homo sapiens
ccgaggtaccacggcctcagagtcacagctttgtgacattagggggcaatctccagctttacgttttagaagacagtttgttttttgatgtatatttttaatatccccagattaaagaaaactcagggcaagtaacacactaaaagggcctttacaatttttttcttgctgttattttgagatgcatctgttgcaaaatatgtcaatgttagaaatcaagctccttcatatagggatagatcatttgaaatagatttctctcaagaataatccaattattactttttagtgtttgcataaattcactccagaagtcatccacagt

SEQ ID NO: 562 - DNA, 303 bp, Homo sapiens
accagatggaaatgatatttgcttcactccattttgaatttctgcctgaattagctcttgtttcagttcttcaatttctttcttcagtttagcattttcaactcgaagtttcttctcttccctcaaagttgcctgcaaaattgctttctccttaagtagagaaacttgctgcttaagatattcaatgatttgatctgcctctgcacccttctgctccagtctcttcagaacagcatcattatttgccatttttgccaagagacggcagaaaatcatgaagcggaggaccacgggttccgagac

SEQ ID NO: 563 - DNA, 279 bp, Homo sapiens
tcgaggtacacagtcattgaagactctccggaattcagatttgaaaccatatattatcttcattgcacccccttcacaagaaagacttcgggcattattggccaaagaaggcaagaatccaaagcctgaagagttgagagaaatcattgagaagacaagagagatggagcagaacaatggccactactttgatacggcaattgtgaattccgatcttgataaagcctatcaggaattgcttaggttaattaacaaacttgatactgaacctcagtgggt

SEQ ID NO: 564 - DNA, 427 bp, Homo sapiens
ccgaggtactgtgtagtggtatcagtgttaaaaatggaagatcattatgaagaaacaatttgtcatttgggtatatctgtttctataggacaaggatttgtgtctaaatattccttacttgtatctcagaggactatctgttaaataattgatcttaatgccagcataagaaatcaagggaactatttctcagacatttctttctctaaattaagtagggtttcaggttccaagtttacattgagagaactatgttacctgggagagaatgtaaatttttctaattcccaaacaaaaccactaatttctaggaaacatttattgtttatatgcagatcctagagacttctatttcagtgcggatcaacaacttcaaaaatatacagcctcctatttatttacaataatatttacatacaaatgaagt

SEQ ID NO: 565 - DNA, 214 bp, Homo sapiens
tcgaggtactgggtcttttccagccaggcctgcaacggtgaccttaatcccagctcgcctcatgacatctacagggatgaccgtctccatttcctctgctcctttagccaggatgaccagagctcttttggaagccatttttatgttatatgtttacaagccccacaccaggctgaaaatgaacgcacgccagcacgcacgcgcgccgtccggc

SEQ ID NO: 566 - DNA, 382 bp, Homo sapiens
ccgaggtacttttagttttttcacataactctctaaaggccttttcaaaaagtctctttcactggcatcatctactagaacaatttcttctatcatgtgtcttggtgagcgattaatgacactatggacagttcgcagaagtgtgctccaagcctcattgtggaaaacaatcaccacacttgttgtaggaagattatctggatacacctttgttttacacccttctaacctaacatctggtaaagatctgttgagtgcaatcatctcacttgccattaaattgaactgattgattttaaacatctctttcatcttttcttgatcctctttaggaatgacgactggtttccccatttctccaggaccttcatgaggcttttgt

SEQ ID NO: 567 - DNA, 271 bp, Homo sapiens
  misc_feature 168: n = A,T,C or G
cgaggtacaattacccaccactggaggtgactcagagaggacccccagagggtgtctccatcttccctatttattttcagcccttgagggcttcattgtagatcaaagccaaggcccccaggaaggtgacatactcctggaagttcacctcctggtccttgttccggnccaagtcttccatcagccttgcaatttcagcatcctgcagcttcgagccaatggtgagctccttctggatcagctccttcagctccttcttgctcagggtgtg

SEQ ID NO: 568 - DNA, 340 bp, Homo sapiens
  misc_feature 326: n = A,T,C or G
cgaggtgcagtgtatattcctttgttgtgaatccaaatctttttcataggtaatgacagatgccttaatgtgaagcttatttataatagcaataaacctaactggatttggatgaagaagtcttaatactgacatactggatttttaatgcactggtttgttatttggtattctatctctttttccaggcctccaggttgcacatttatttattatgttcaatactttggttcttagttcttaaagaatcaagaagttgtgtaatcttttaaaaatattatcttgcagataaagaaaaaaattaagagtgtgtttacaactgtttnctcttttttacagt

SEQ ID NO: 569 - DNA, 156 bp, Homo sapiens
gccaggtaaaccaagacttggtctcagtgaagaaattccagaggtcaccggcaaagaagttcccttctcatcatcttcatctcagctattaaagatatatacagttgtacagtttgctctgatgttggcattttatgaagagacctttgcagatac

SEQ ID NO: 570 - DNA, 216 bp, Homo sapiens
  misc_feature 176: n = A,T,C or G
acagtactcagtatatctgagataaactctataatgttttggataaaaataacattccaatcactattgtatatatgtgcatgtattttttaaattaaagatgtctagttgctttttataagaccaagaaggagaaaatccgacaacctggaaagaattttggtttcactgcttgnatgatggttcccattcataccctataaatctctaacaaga

SEQ ID NO: 571 - DNA, 163 bp, Homo sapiens
tcgaggttttgtaatccaaggttctgactaaaagcaaaaatacacggcatagattgcaacagcaaagaagtgtccaattaaaactagagggttaggagacaatacagaaagcagcccaacaggacccgcaacacattcgccaccaagttttgaaataaagaaa

SEQ ID NO: 572 - DNA, 156 bp, Homo sapiens
gccaacgtgcagcggctgaaggagtaccgctccaaactcatcctcttccccaggaagccctcggcccccaagaagggagacagttctgctgaagaactgaaactggccacccagctgaccggaccggtcatgcccgtccggaacgtctattagaag

SEQ ID NO: 573 - DNA, 414 bp, Homo sapiens
ctggagccgctgtggttgctgtccgcggagtggaagcgcgtgcttttgtttgtgtccctggccatggcgctgcagctctcccgggagcagggaatcaccctgcgcgggagcgccgaaatcgtggccgagttcttctcattcggcatcaacagcattttatatcagcgtggcatatatccatctgaaacctttactcgagtgcagaaatacggactcaccttgcttgtaactactgatcttgagctcataaaatacctaaataatgtggtggaacaattgaaagattggttatacaagtgttcagttcagaaactggttgtagttatctcaaatattgaaagtggtgaggtcctggaaagatggcagtttgatattgagtgtgacaagactgcaaaagatgacagtgcacccaga

SEQ ID NO: 574 - DNA, 414 bp, Homo sapiens; identical to SEQ ID NO: 573

SEQ ID NO: 575 - DNA, 417 bp, Homo sapiens
  misc_feature 383: n = A,T,C or G
tggtatgggtcatataggttcggtacaacatgaagccatggtcctgggtatggaagaatgagtacttcagacaaacagaaataaaagaggacactgtgactatagccaaggaacttttgcgtatagctgttaagggaggttgtcatctccaccagatgtgggtttatgccttacctgcttgacagcctcaaaggtcattggcaagattgaatgaatgggcccacgggggcaaagcaagtctaggaaagccagtaaatgcccaacctattagaataagggagaagaattagaatatcagggaagtttctggatagaggacaagaaagaataggctatttagaaaaaaaaaggtgtggtcccattattttcaggcttcaccctanatgacacatgagcaaaagcccacttcgccatcat

SEQ ID NO: 576 - DNA, 245 bp, Homo sapiens
ggaaggggggaccctgccaaagatgaggctccagctgccctggggggagggtggtggccattactagagggggcctgggtcctctccccaggggctgccagcatccaggccaggaagcctggagccaagaaccttctggctctgagggagcaagagctggcaggcggcagggctggcacagacagacggaagcagaaaggacagtttggctgctgtgtctgctgcgcacgccccctccccggaca

SEQ ID NO: 577 - DNA, 418 bp, Homo sapiens
gaaaaccctttaatgttgggctttctttaaataaaacagaaaggttgcagctttcccatggtggctgtaaggcaagaacagcagtgagggcgggcgtgttctatcgggcagtgctgcagcccttgactctggctcaaggtgggcttcctggaggcagcggcaaggaggcagttctggatgtgcaggcacagatgtaggggaacaggcaagcgggcacagggccctgagctgacaagcagtgacccctgcacccagctagatggggcaccccctctctgggagctgagggcatcagctggagcctcaggctgggaccagccccaactttgccttggtgactctgggccattccaggcctcagtttccccactgtaaggtgaggcattaggcaggagggggtggccccagccagtgtcct

SEQ ID NO: 578 - DNA, 363 bp, Homo sapiens
  misc_feature 153: n = A,T,C or G
aaagcccagaaggcactttattggaggtctctgcctccattcacaggagaaaggagctgggagccccatcctagggtcccagcatcagcccactggagggcctggaacagtccagcactctgtgggagaggagtggggaggggaatgttttanaaaaaatagatctctatgtacatctgacatatttatatagcacataaattagggagtgctctgacccctgcccgtggagcccaagcactgagcagggaggtgaacgccagtccagaaagaaggtgctggagcccctgctctgttctctccatcacggggctcccctagggcctccccaggcctccttggctcagtccaggtttgtctgca

SEQ ID NO: 579 - DNA, 403 bp, Homo sapiens
ggaataatcagctcttctggcccacaagtaggaatgatcaatgagaacttaacttagtcctttatttggggattttttcatcaaacaaaaatttcttgaattggggagaccacttccctgtaactccagtattgccccctctcactttagcatatattaattagcaggttgggctagagaaatcagctgctatgcgggttgattattattattatttctaatccttttccttatttgccttctactccccttaatctaatctaaaagctctgttccatgcaactggagttccttatccctctcttccccttcccttatatattgaggctatggggtaggagaaaagtgcacaacccaccaccccctttactcgtgcattaaaatttcttatttacccttttcc

SEQ ID NO: 580 - DNA, 403 bp, Homo sapiens; identical to SEQ ID NO: 579

SEQ ID NO: 581 - DNA, 432 bp, Homo sapiens
acctgataaaagttaataatctcttgttaggaaagctgtccattaataaggccagtcttcagcaaaactaaaaccattttgttcgtttagctttcctagtctgacaacgcaatactgttgaaccacagtcaaatataatgacaacattggatggatagatcagtaccattggttacagctgttaaacaggttcgttcttggcgccacataaaaacaagccaataacatcgaataaatcatggctttttttttctttatcacaattcacttaagtgatgttaattatggtccttgtcaaacacgtttggtaaaggctatttacagtgtacatggctgagcatgcactatttatagttacaaagatacctgccagtttattacaatagaatacacagtgctgaaatggtgaactctcccatcttaatatatatt

SEQ ID NO: 582 - DNA, 215 bp, Homo sapiens
  misc_feature 121, 131, 142, 144, 147, 156, 160, 174, 178, 184, 194, 206: n = A,T,C or G
gtttatttcagctttacttaaaattttagtttcaaatgaaatgaaatgtgacactgaagcataagaacacaactgaagactgcaaacaacctaattcattttcccaggttgcttaagcctncaagcaccantcaaatatcgnantcnattaaaagnaggnctttcccatttgtngccngcttcngaatggaacntatttaaaaccntcaatttct

SEQ ID NO: 583 - DNA, 426 bp, Homo sapiens
  misc_feature 408: n = A,T,C or G
tgggcgcctgtgggactgggtgcctctggcgtgcagaagcttctctcttggtgtgcctagattgatcggtataaggctcactctcccgccccccaaagtggttgatcgttggaacgagaaaagggccatgttcggagtgtatgacaacatcgggatcctgggaaactttgaaaagcaccccaaagaactgatcagggggcccatatggcttcgaggttggaaagggaatgaattgcaacgttgtatccgaaagaggaaaatggttggaagtagaatgttcgctgatgacctgcacaaccttaataaacgcatccgctatctctacaaacactttaaccgacatgggaagtttcgatagaagagaaagctgagaacttcggaaaaggctcatctgtcaccctggagaanggaaactgtacttttccc

SEQ ID NO: 584 - DNA, 431 bp, Homo sapiens
cactgttgctgttttcagatacaccagaagagggcatcagatctcattatgggtggttgtgagccaccatgtggttgctgggatttgaactcaggaccttcggaagaacagtcagtgctcttaaccactgagccatctctccagcccagatttccttttgatggtgaagcattttaattttaccattttgctttgaaagggcactgctctatgttctggcactatcggtattctggactcctcttcgtaaaacatttctttataacaaaaggtgcacttacttttatttcggtgtgtgttttgcctgcatgaacgacttgacatctcaagcctacctggtgtctggagaggcccgaacaggatgtcagatgccctagaactagagataccgaccgttgtgcgctaccatctgggtgctgggaattgaacta

SEQ ID NO: 585 - DNA, 412 bp, Homo sapiens
aagagagaaagagaacatttttataccaaggagggattgactttcagaaaagagtagacttctctctcctcccttcctccaaaaaaagaagttggaaaccttctgtttttgtgtgtgtgtttttggttgttctttgtttgtttttgtttttgagatggagtctcactctgtcacccacgctactgcagtcagcctgggtgacagagtaagattctgtctcaaaagaaaaaaaaagacagaaaagaaatggactctgatggaaaagatgtgtacaaggctgattatactaagcagagggatatttaaataaatgctaagaagagaggcaggtgaagctccaggggagccatccttcccaaatgttcacttaaattttcagcggtttgggtatgccagatggtgaacctaggta

SEQ ID NO: 586 - DNA, 431 bp, Homo sapiens
aagaaaagggagccaagaagaaagtggttgatccattttctaagaaagattggtatgatgtgaaagcacctgctatgttcaatataagaaatattggaaagacgctcgtcaccaggacccaaggaaccaaaattgcatctgatggtctcaagggtcgtgtgtttgaagtgagtcttgctgatttgcagaatgatgaagttgcatttagaaaattcaagctgattactgaagatgttcagggtaaaaactgcctgactaacttccatggcatggatcttacccgtgacaaaatgtgttccatggtcaaaaaatggcagacaatgattgaagctcacgttgatgtcaagactaccgatggttacttgcttcgtctgttctgtgttggttttactaaaaaacgcaacaatcagatacggaagacctcttatgct

SEQ ID NO: 587 - DNA, 132 bp, Homo sapiens
  misc_feature 90, 128: n = A,T,C or G
aactttcccatggtcaaaggaaaaacaagcaggagttgagtggctggggtggggtgcaggcaatggagagagggcataagggtgtagaanctgaagggggctagaagcttactcctgagcttcttacntccg

SEQ ID NO: 588 - DNA, 425 bp, Homo sapiens
  misc_feature 13, 32, 47, 53, 56, 70, 72, 102, 128, 129, 165, 190, 420: n = A,T,C or G
gggcttcttcaangaacctcagctgaaacctntgggggattactganttgatntgnccaccagaacaggngngctcgcttttgttctgaaatcaaatcctcnaaagaccgggagaaggggtcacccanncgtggatcgttggcattgtgggaaaagggaaaccgnaacggcccggatcattgacaagccncgaagttattgaagtcctgcctcgtggggccacagctgcttgttcttgctcctgacagttcaaatgcctcctttgagcctagctcgtgagatgaaagaacagaagttgtttggaccttagagccattatccacaatcacggatggttctcaagagttgattgtaagaaatttccaaagaaggctgcctgcatagtggttccggctgccctttctaggtgattggaatcancccat

SEQ ID NO: 589 - DNA, 425 bp, Homo sapiens
caacagttattttattaggatgtcagccctgggtccagagtgagagatagggacaggggacagcccagcgaggctgggtcgggggtcactccaggatgttccaaccacaggggcagcatctcctccactccacatgctggccaagggcacagagctgccgtatcgcctgccaagggggtggctcaatgctgctgccctggtcctgtatgggcccggggtgccgagaacagacagcaagcctcaggcgccggtcctttgagctttcttgatttcctcagagagcgcctccttcagctctgcgtaggcctggtccaggctgtcgttaatgatgaccacatcaaacaggccgggctccttgctgctctccatgtcggcctgggcagcagccagccgcttcaccaggctctcctcggtttcagtgttgc

SEQ ID NO: 590 - DNA, 425 bp, Homo sapiens
acaagtatacatataatctagataagggctgtaatgtttcctaatattaattactgtacttaaaaatttacaggacatgaacataaataaagctgtttaaaactggcaaacgtagtaatagtctgtcattcagtacaaggtatatttatgttatttccaaagccatcaccctaaaatcctaagttgccactcttaaaacctaaaaataatgtcgaaaactaaagtcataaatacatgtatacatacatttgcatatttacacttatgcagaaatcatcaatatactagagcccagctttaacactgtccttcagtttcacacagaaggacccctaataactgtaaatatataaatatgtcaggttaaagggaaaaggtgttcagggcacttcttgtcctctctgtcccataacctacctccaccc

SEQ ID NO: 591 - DNA, 425 bp, Homo sapiens
aagtatgtatgtacaagactcaagtaaatagaaaggcagctttcaatcacaaatcagtttttcagattttactgtggaagcatatttaatgcacacatttgaatgttacacataaataattttaacgatggagtccaagttctggattttacattagatctgcatatataagacacttgtggtcaaatttcaagattggtaaagccagtttcaagctgcttatattttgagtacaggtttcactattacaaatatatgatgttaaactaacaaactcatgaccttcaaagatgtcttcgtcccacgcacacacatttgtaatttgtgtccatttgctatttcccttcttctataatcttcaaattatatagttatgcattgagttccctatgcatctcacccatctcctttatctcagccttctc

SEQ ID NO: 592 - DNA, 299 bp, Homo sapiens
agtgaaaatgggttggtttttgtcttcgacgctcagggtctgggcgcctcgcatttgcagtctgttgtgacagacacggggagctccgcgtgccagcctgtggctgccctgctgtgggggtcctggggccggcgaggccccttcagtcttgttctggggggacggcccactccggggagggggtgtgctgtgctgagcgctgtatccctgaatatagtttattttttctacatttgaattctgttgtagatttatgtaaaaatacattctttttgaaaataaaaattttcatgtcttct

SEQ ID NO: 593 - DNA, 425 bp, Homo sapiens
tttttttttctttttcccaggaggcggcgacggcggcggcggggggagaggaagagaaagaagcgtctccagctgaagccaatgcagccctccggctctccgcgaagaagttccctgccccgatgagcccccgccgtgcgtccccgactatccccaggcgggcgtggggcaccgggcccagcgccgacgatcgctgccgttttgcccttgggagtaggatgtggtgaaaggatggggcttctcccttacggggctcacaatggccagaaaagattccgtgaagtgtctgcgctgcctgctctacgccctcaatctgctcttttggaatcatcacattccacttctaaaaggagctttaaagatggcctggttgaacgtccttcctttgtgagtgaggaaattaagtgcagattaagtgacttgcc

SEQ ID NO: 594 - DNA, 425 bp, Homo sapiens
gtcactagctggctaaggcttaaagcagagacgtgtgactgggtctctcgggagggcctctggttcttcccgggctcaggcttgctgggggctgggggccagggctctggcgacctagaggtgtggacggcacagctgcaggaggccttctcttaaccctccgagagtgggactgggagatttcctctgaagtcccaaagaggccctgtgcccaggggacctcctcctcggcctcccaggtgggtggtgcaagctggttcttggccatgctccaggctcgggtgggcacaggcgtccactccagtgtgctgcgtgcttgtgagactgcctgttctgggaccagcccctgggctcttccaccaagatttggtgagggtccccctctgcctctcacagaagcccctggccctggactgtcctggggg

SEQ ID NO: 595 - DNA, 162 bp, Homo sapiens
  misc_feature 43, 102, 126, 154, 158, 160: n = A,T,C or G
ctttacattattttttttccaaaaagactagtatttatacaangggcaatagaaacaaaaacaaaaacccttccgactgccacctggaaggggctggctggnctgctccctctcccacctggaacnggggggggcactgggcaggagggaatgnggangngg

SEQ ID NO: 596 - DNA, 283 bp, Homo sapiens
  misc_feature 17, 106, 111, 115, 120, 127, 131, 144, 150, 153, 155, 160,166, 171, 176, 182, 201, 203, 205, 212, 220, 221, 224, 232,239, 242, 259: n = A,T,C or G
aaggtgactcaacaccntcttcctcaaggacttcttggtgatactctcttgtcttttccagttaccctcttcctcctttgtcctctgtgcttgggctcacaacttnatggnctgnacttnataaaanaacnatggcaactttgncctgantgncnccctncccaanctganctggntggaanaagaaacttggaaactatntnanccatggntttgggannctncccccttncccatgnctnctaataaaaccatgcantgcctttggagagaagagaccccc

SEQ ID NO: 597 - DNA, 426 bp, Homo sapiens
  misc_feature 41, 43, 46, 197, 200, 207, 211, 217, 255, 277, 287, 293,297, 304, 318, 327, 333, 355, 357, 359, 375, 379, 380, 394,405, 407, 409: n = A,T,C or G
gaaatacaaatgtggattctcatcactgaaaaatctttgangntgngtttattcctttcatcattttttaaatattttttttactgcctatgggctgtgatgtatatagaagttgtacattaaacataccctcatttttttcttttcttttttttttttttttttagcccaaagttttagtttctttttcatgatgnggnacctccnaagngatggnagatttaaataattttttatttttattttatatatttnttcattagggccttttctcccnaaaacgaaanaaaaantccnaaaaacnaaacccaaaaaaanagagggtantgtccnagtttctgtatgtataaagtcntncncgatttcaggagagcnctgnncccaatttgctccntgaatcaaggngngnaaatggtttttttggcg

SEQ ID NO: 598 - DNA, 412 bp, Homo sapiens
  misc_feature 241, 262, 300, 309, 312, 318, 327, 329, 385, 390, 399, 402: n = A,T,C or G
tttttttttttttttttttgccacctagagatgataatttattgttttaccatgactcagaagagaaacaacataaagagaatatttcaaatccccacaatttccttctcaacctcactactcttaacatttctttatcagacgccactggcttcctaaaatggaccctggactatgtatggggaccacattcattatgctgcctttcctcttatgattaaaactttagccctcattcganggttccaatggtacttttagnggaggagtccctagcttttaaaaaaaccacttttcctntaaaatccnttntttatngaaaaaaancntttttaaaaatgttaaggaggattttaaatgaccatattcaattaaaaaaaaaatnccttntggaacatnttngcagaaacct

SEQ ID NO: 599 - DNA, 415 bp, Homo sapiens
ccaagatgacaaagaaaagaaggaacaatggtcgtgccaaaaagggccgcggccacgtgcagcctattcgctgcactaactgtgcccgatgcgtgcccaaggacaaggccattaagaaattcgtcattcgaaacatagtggaggccgcagcagtcagggacatttctgaagcgagcgtcttcgatgcctatgtgcttcccaagctgtatgtgaagctacattactgtgtgagttgtgcaattcacagcaaagtagtcaggaatcgatctcgtgaagcccgcaaggaccgaacacccccaccccgatttagacctgcgggtgctgccccacgtcccccaccaaagcccatgtaaggagctgagttcttaaagactgaagacaggctattctctggagaaaaataaaatggaaattg

SEQ ID NO: 600 - DNA, 208 bp, Homo sapiens
  misc_feature 45, 66: n = A,T,C or G
aaaccgccttttttttttttttttttttaatatgcagtttgtaanaacaaaactggatggcatcanaattgtctggaagttttgtcttgggcagtatgggctgggccaaatgaaatgatttttataattctaaacaggttaccaaatgaaatgtcatggctttactttggcaattaaaggggggaatttttttaaaaaaaaaaaaaaa

SEQ ID NO: 601 - DNA, 165 bp, Homo sapiens
  misc_feature 19: n = A,T,C or G
tgcaggtcgacactagtgnatccaaagaaagtaacctaaacttgacctgcttaatacattctagggcagagaacccaggatgggacactaaaaaaatgtgtttatttcattatctgcttggatttatttgtgtttttgtaacacaaaaaataaatgttttgatat

SEQ ID NO: 602 - DNA, 416 bp, Homo sapiens
aaaacggttttgccgagttgggacgtccactgctgtcaagtcaaccagagatttgaactgtgcattggtgtgatccctgaggaaagtcagcactgggatgacgccatcaggatggatacagacctctaactcattgaagcaggacacctgaacttgttggacatacttgggcaagatttcagccacatactctccaaaagctgagagctgcttgtgggccacatcattccgtggtctgacagtggggcgcgtgtcggccccggcgctctcccgcctcaccggcagcaacagaacggagggtcgcccagtccccctggtcagcgccgaggcccccaagatcccgcgccaccacagcctggctaccgccgccgcgagtacttctagagcggccgcgggcccatcgattttccacccgg

SEQ ID NO: 603 - DNA, 416 bp, Homo sapiens
  misc_feature 31, 99, 174, 242, 249, 331, 415: n = A,T,C or G
catgagcataaaaaaaaaacccaaacctgtnccatacccctcccactcatgcaaacagctcttaaaatgaagaattctttcaaaattttacgttttttncattcttggctcaattcttttgctttcctcatcatcagaattcaaactttgggcaaacatgggttttgggctgantctttggaatatgctggaaaaaccccaatatgggctgcttctgcttgtttggcatgacgcaaaatggnttcccangatactgcatcgtcttgccaagaatgttccattagaaaaaggcccgggtcctcgccacactggctggcctctgctgggtgcntctagagtatatcggctgcacctcagtgcatctgtccataatttttttgaaaaaaaaaactcaatcttaacgcgggcatattcnc

SEQ ID NO: 604 - DNA, 414 bp, Homo sapiens
  misc_feature 291, 359, 367, 369, 371, 374, 381, 383, 387, 400: n = A,T,C or G
aaaatttatgagctttattaaagcggtttatcacaaagatggaaacgtacaaatgagaagcatgcaaccatcatcttccacagtcaagtcaaactgctatttctctctctctcctgtttcatagagctggaaactgcaggtgttatacccaacctattcatcctcaacactgtagtcacgccccggaaactactcagggcaccaaacatccaaaacataaactattattatacaaagaaagtgcaaagttaaaaaagaaaacatggagacccctcccccccataccctcanctaaaggctaacaatggcacttgggctcttgcttaatctagattgtcttcaaaaagtctctaaaatgngatactgngngnggnggggggngngaanggtccaaaagctncttagtgtttgaaa

SEQ ID NO: 605 - DNA, 417 bp, Homo sapiens
tcctctttcacaatcactcaacaaacaggtcacacatcccctaggtccacgaactcatcttctcgtttggccaaatcgtcttcatctcccaaagctttccagccactggtgggtaagacgggcttagaggaatgtcgctggagcagagcgaaaggaaacaaagacgagaggcgggcagagttcctcagcaggcagggggcctcagcctggggggcctgctggctgtggtgtctctcgtcgatcttctcttgtaaactctggacttcctccatcatttccaagagtttgctcagagtggccacttggccaccacctaggatttgggcttctggaatccaacgtaggtagcgctgggcccagactttgatttcgggcccctcgatatgcggtaacaacaaaccatggtagtcagtggac

SEQ ID NO: 606 - DNA, 413 bp, Homo sapiens
ctgaattctttaatttaaaaaaatcatacctaggaggtgtgctataggaattcagatacaataagttgcatataaaacccgacctcattgctcattgtggtaaagcaaggatgatgagaaaatgcacctcaggagcaaaaacacgctttacgggcactccgggacccaagtcccgagacatttccacgtgaccttctggaaagacacaccgcccacctgactgcacgacgggactggtccagcctcccggctcctcaggaaggagatgagtttcctacaaagtgagtggccacagctccaggacagggcgtccacatgtcgttgtgggtctggctggattttgaggtgccgaggaactggtcggtgtcctgatcgtattgtacgtggtgctctcgatctcccaactgccataa

SEQ ID NO: 607 - DNA, 414 bp, Homo sapiens
  misc_feature 376, 384: n = A,T,C or G
attttcattaaaactgtcagaatttgcttactataattatgatacagtccaaagaatgcagtcactttttatcatgttaactaattgttctcttttgaagatctatggttgactaattaaacaataattcaagtagagtgtcccagaaaaaaaccacttgggctccctgtttggagtctggctggctctgagcattgccaatggcccctactcacctgactttgtatcctctccttttagaggctttgcattctgcacccagcttcactaacagtgggctgaaaacatccttgggttgagtgtttcatttgggagttatttggccagggccttttgaacagtaagtgtccccatgaagtgctagataatatatggngtaaagangtcagctttttttttttttttaactctaac

SEQ ID NO: 608 - DNA, 415 bp, Homo sapiens
  misc_feature 22, 288, 307, 310, 322, 336, 340, 343, 352, 353, 372, 381,395, 408: n = A,T,C or G
gcagtggtctgatcttaagggnctatatatttgcacctcctcattcaacacagggctggaggttctacaacaggaaatcaggcctacagcatcctgtgtatcttgcagttgggatttttaaacatactataaagtctgtgttggtatagtacccttcataaggaaaaaatgaagtaatgcctataagtagcaggcctttgtacctcagtgtgaagagaaatcaagagatgctaaaagctttacaatggaagtggcctcatggatgaatccggggtatgagcccagganaacgtgctgctttttggtnacntatccctttttntcttaagaaagcanggtnctntcttattannaaatatgttaaaaaatggnaagcaaacnacaggtgcctttanaaattaccaattnttaactt

SEQ ID NO: 609 - DNA, 420 bp, Homo sapiens
ggttttaaaattatttcttgaatctctccatacacaggcaaaaataagtgtgttacttaacatactggaaattgcctaacttaatcattgcctaaagaagagaaaattatccccaaaacgtgcttaaccaggaggccaatgcatttgccgacctccaagaacatggagatgaacgtgatagacagactgtccaccatctgaaccttcattcaccaccattcgataacccttattcaggcccagatcagcagcacatttcttgccaacaatcattaagtgtccaagaagactttcatcatcatcttctgccacagaaatctgggatatatgtttcttgggtatcaccagaaaatgtgttggtgcttgaggggaaatgtcatggaaagcaaggcaccggtcatccttaaaaatgattttggc

SEQ ID NO: 610 - DNA, 158 bp, Homo sapiens
  misc_feature 25, 29, 31, 37, 66, 83, 86: n = A,T,C or G
caactttaaaaaaaagggggcggtnaaananccaaanataaaaaggtccctttggtggataaaggnccctttccgggaccggnccnggacccacctttgggcccaaagggggatttaccgggtaaaccaagcctttaaagcgttgggggttaaatttc

SEQ ID NO: 611 - DNA, 159 bp, Homo sapiens
  misc_feature 132, 147, 152, 154: n = A,T,C or G
tcgacactagtggatccaaaggaagatggcggacattcagactgagcgtgcctaccaaaagcagccgaccatctttcaaaacaagaagagggtcctgctgggagaaactggcaaggagaagctcccgcggtnctacaagaacatcgntctgngnttcaa

SEQ ID NO: 612 - DNA, 419 bp, Homo sapiens
gcattttttattaagacatttggggcccgagtttcctctcctcctcccctccatcctgtgctctctaaattcagcttttggaaacctaagtgtgcccaccttccccagcaggtagccagagcctccggggtccctcttccttccttctttctccccagatactgcaagagacacccaagtctgctgtcagcagagggtgaagcgtctggcactgatgttcatgcgcgtgagtcccagatgccgcagcggtggggccagaggcaagccagtcccagactctaactccatctccagctcagcctcatccagaagctcctggtgcaggtgacagacttggtccactttcagtctgtgcagccgggcccgcagcctgagcagctgccctgccagctgccggtcctgagcccgcatctcctgca

SEQ ID NO: 613 - DNA, 419 bp, Homo sapiens
  misc_feature 395: n = A,T,C or G
ccccatactgaggcatataaagtttgcaaaaccaaggggcctgtcttcccaaggtcttactataaaatctgggttaggctaaaacttattatgtagaccagagaggcgttgattttaaaccaatcatcctgtctcatcttcattatttctggctttatgagcagaatgtcctgctacctttggcttcttataaagatctttaatggagtattttaaacattggaaaatccatgagtttgagcttatttggagaatgctgctaagaatgggattgactgacataacttactagcctctttcctgcttgaggtacagcagttttcaatcccaatgtgtaaagtgcttagaagttatcactccccaccttagagcaaaaaccttcagagaacttcagncactccaccaggcaaatagcacct

SEQ ID NO: 614 - DNA, 123 bp, Homo sapiens
  misc_feature 2, 37, 74, 76, 87, 88, 91, 96, 105, 112, 117, 121: n = A,T,C or G
gnggtatggactagaaaacttggaatgactcatgaanaaaccttggaatgacacatgaagcatgatagggaaantnattctgaggcnngangcttnactgaattntttccanccagnggtntt

SEQ ID NO: 615 - DNA, 362 bp, Homo sapiens
gaccttgaggtttcatcgggtgattgcccttgatttcttaggctttggcttcagtgacaaaccgagaccacatcactattccatatttgagcaggccagcatcgtggaagcgcttttgcggcatctggggctccagaaccgcaggatcaaccttctttctcatgactatggagatattgttgctcaggagcttctctacaggtacaagcagaatcgatctggtcggcttaccataaagagtctctgtctgtcaaatggaggtatctttcctgagactcaccgtccactccttctccaaaagctactcaaagatggaggtgtgctgtcacccatcctcacacgactgatgaacttctttgtat

SEQ ID NO: 616 - DNA, 210 bp, Homo sapiens
  misc_feature 156, 181, 194: n = A,T,C or G
tgatgccaccccgtcacccctcccctcctgagcagggatccaagaatgtgccaagagtcccgccagcctcagccaggtgggcctgtatatagggtccatgtgcaatagggagggacgtcttctattttttgctgccccctccccgcccactgtctnggggcagggggagaaggtattttcnagataaagcacangcaccacaaataaaag

SEQ ID NO: 617 - DNA, 511 bp, Homo sapiens
acgagctttcgtggctcactccctttcctctgctgccgctcggtcacgcttgtgcccgaaggaggaaacagtgacagacctggagactgcagttctctatccttcacacagctctttcaccatgcctggatcacttcctttgaatgcagaagcttgctggccaaaagatgtgggaattgttgcccttgagatctattttccttctcaatatgttgatcaagcagagttggaaaaatatgatggtgtagatgctggaaagtataccattggcttgggccaggccaagatgggcttctgcacagatagagaagatattaactctctttgcatgactgtggttcagaatcttatggagagaaataacctttcctatgattgcattgggcggctggaagttggaacagagacaatcatcgacaaatcaaagtctgtgaagactaatttgatgcagctgtttgaagagtctgggaatacagatatagaaggaatcgacacaactaatgcatgctat

SEQ ID NO: 618 - DNA, 511 bp, Homo sapiens
acgaggccacagaggcggcggagagatggccttcagcggttcccaggctccctacctgagtccagctgtccccttttctgggactattcaaggaggtctccaggacggacttcagatcactgtcaatgggaccgttctcagctccagtggaaccaggtttgctgtgaactttcagactggcttcagtggaaatgacattgccttccacttcaaccctcggtttgaagatggagggtacgtggtgtgcaacacgaggcagaacggaagctgggggcccgaggagaggaagacacacatgcctttccagaaggggatgccctttgacctctgcttcctggtgcagagctcagatttcaaggtgatggtgaacgggatcctcttcgtgcagtacttccaccgcgtgcccttccaccgtgtggacaccatctccgtcaatggctctgtgcagctgtcctacatcagcttccagcctcccggcgtgtggcctgccaacccggctcccattacccag

SEQ ID NO: 619 - DNA, 413 bp, Homo sapiens
gaattcggcacgagctggacaggagaagagcctggctgctgaaggcagggctgacacgaccacgggcagcattgctggagccccagaggatgaaagatcgcagagcacagccccccaggcaccagagtgcttcgaccctgccggaccggctgggctcgtgaggccgacatctggcctttcccagggcccaggaaaggaaaccttggaaagtgctctaatcgctctagactctgaaaaacccaagaaacttcgcttccacccaaagcagctgtacttctctgccaggcagggtgagctgcagaaggtgcttctcatgctggttgatggaattgatcccaacttcaaaatggagcaccaaagtaagcgttccccattacatgctgctgcggaggctggccacgtggacatctgcc

SEQ ID NO: 620 - DNA, 415 bp, Homo sapiens
gaattcggcacgagcggcgacggtggtggtgactgagcggagcccggtgacaggatgttggtgttggtattaggagatctgcacatcccacaccggtgcaacagtttgccagctaaattcaaaaaactcctggtgccaggaaaaattcagcacattctctgcacaggaaacctttgcaccaaagagagttatgactatctcaagactctggctggtgatgttcatattgtgagaggagacttcgatgagaatctgaattatccagaacagaaagttgtgactgttggacagttcaaaattggtctgatccatggacatcaagttattccatggggagatatggccagcttagccctgttgcagaggcaatttgatgtggacattcttatctcgggacacacacacaaatttgaag

SEQ ID NO: 621 - DNA, 421 bp, Homo sapiens
  misc_feature 8: n = A,T,C or G
agaattcngcacgagtggcagcctaagccgtgggagggttccagtcgagaatgggaagatgaaagacttcagatggaacagaaataaatgccttttttgacaaacgcagcagtgcgtgcctctagcttgcaagagcgttactccccttcatagctttaaaaggttttcgcactgcgtgcagttagagtagctaaatcttgtgtgacgctccacaaacacttgtaagaattttgcagagaaagataaccgttgccacccaatgccccccacaggcattctactccccagtacctcttagggtgggagaaatggtgaagagttgttcctacaacttgctaacctagtggacagggtagtagattagcatcatccggatagatgtgaagaggacggctgtttggataataattaaggataaaat

SEQ ID NO: 622 - DNA, 431 bp, Homo sapiens
  misc_feature 8, 11, 17: n = A,T,C or G
cccggggnggncctggncataaaactttaaattttactagtgttacttaatgtatattctaaaaagagaatgcagtaactaatgccctaaatgtttgatctctgtttgtcattactttttcaaaattatttttttctgtaaagtataatatataaaacttcttgcttaaattgaatttctatattagtggttaattgcagtttattaaagggatcattatcagtaatttcatagcaactgttctagtgttttgtgtttttaaaacagaattaggaatttgagatatctgattatatttttcatatgaatcacagacctcggccgcgaccacgctaagggcgaattccagcacactggcggccgctactagtggatccgagctcggtaccaagcttgggcgtaatcatggtcatagcctgtttcctgtgtga

SEQ ID NO: 623 - DNA, 421 bp, Homo sapiens
  misc_feature 81, 101, 103, 107, 111, 112, 180, 309, 331, 388, 404, 415: n = A,T,C or G
agaattcggcacgaggaaacatggactgccccttaaattttgactgtcctaaaaacctatttctgatttataatatgctgnctgataaagtgacactagangnaccnactnnatggtttaaatcttcccattcccagaatccagaattttggaagccattttaaccaggggtattttttncaccattaccttttggaactttccaaattaatggccttttaaaaaggttggaaggggaaaaccaaaaggccaaaattttaaaaaggttgggggggggaaccttaaaaaaaaaaatgggttttggggccncctttttttaaaaggccaaaanttttttgggttccaattaaaaaaatttcctttttccaacccaaaattaagaaaaggnaaaattaaaaaaattncaaaaattggntttttt

SEQ ID NO: 624 - DNA, 421 bp, Homo sapiens
aagaattcggcacgagcggatgtgctcactgacattctactccaagtcggagatgcagatccactccaagtcacacaccgagaccaagccccacaagtgcccacattgctccaagaccttcgccaacagctcctacctggcccagcacatccgtatacactcaggggctaagccctacagttgtaacttctgtgagaaatccttccgccagctctcccaccttcagcagcacacccgaatccacactggtgatagaccatacaaatgtgcacacccaggctgtgagaaagccttcacacaactctccaatctgcagtcccacagacggcaacacaacaaagataaacccttcaagtgccacaactgtcatcgggcgtacacggatgcagcctcactagaggtgcacctgtctacgcacaca

SEQ ID NO: 625 - DNA, 421 bp, Homo sapiens; identical to SEQ ID NO: 195

SEQ ID NO: 626 - DNA, 476 bp, Homo sapiens; identical to SEQ ID NO: 196

SEQ ID NO: 627 - DNA, 503 bp, Homo sapiens; identical to SEQ ID NO: 197

SEQ ID NO: 628 - DNA, 248 bp, Homo sapiens
taagtccagggggaataactgtaggcattcctggaatcactgtcttctgttccattgtgtcttggttccagcggctcctcttccgcttcttacttgggaagtccaacggcgtggcgttcgctccggtcgccatggcgcccccggggacaggcaccggcacctgcttttcctctgcggcggcttctccttcgcaagcctcccggggggaggggacccgaatgcgctgccggagcgcgcggagcccgtcc

SEQ ID NO: 629 - DNA, 99 bp, Homo sapiens
actgccagtccaaaggcatcgtggtgaccgcctacagccccctcggctctcctgacaggccctgggccaagcccgaggacccttctctcctggaggatc

SEQ ID NO: 630 - DNA, 640 bp, Homo sapiens
gaagacatgatgctacactcagctttgggtctctgcctcttactcgtcacagtttcttccaaccttgccattgcaataaaaaaggaaaagaggcctcctcagacactctcaagaggatggggagatgacatcacttgggtacaaacttatgaagaaggtctcttttatgctcaaaaaagtaagaagccattaatggttattcatcacctggaggattgtcaatactctcaagcactaaagaaagtatttgcccaaaatgaagaaatacaagaaatggctcagaataagttcatcatgctaaaccttatgcatgaaaccactgataagaatttatcacctgatgggcaatatgtgcctagaatcatgtttgtagacccttctttaacagttagagctgacatagctggaagatactctaacagattgtacacatatgagcctcgggatttacccctattgatagaaaacatgaagaaagcattaagacttattcagtcagagctataagagatgatggaaaaaagccttcacttcaaagaagtcaaatttcatgaagaaaacctctggcacattgacaaatactaaatgtgcaagtatatagattttgtaatattactatttagtttttttaatgtgtttg

SEQ ID NO: 631 - protein, 168 aa, Homo sapiens
EDMMLHSALGLCLLLVTVSSNLAIAIKKEKRPPQTLSRGWGDDITWVQTYEEGLFYAQKSKKPLMVIHHLEDCQYSQALKKVFAQNEEIQEMAQNKFIMLNLMHETTDKNLSPDGQYVPRIMFVDPSLTVRADIAGRYSNRLYTYEPRDLPLLIENMKKALRLIQSEL

SEQ ID NO: 632 - DNA, 402 bp, Homo sapiens
  misc_feature 285, 390: n = A,T,C or G
gcccggacgtaggtagtttgttgggccgggttctgaggccttgcttctctttacttttccactctaggccacgatgccgcagtaccagacctgggaggagttcagccgcgctgccgagaagctttacctcgctgaccctatgaaggcacgtgtggttctcaaatataggcattctgatgggaacttgtgtgttaaagtaacagatgatttagtttgtttggtgtataaaacagaccaagctcaagatgtaaagaaaattgagaaattccacagtcaactaatgcnacttatggtacccaaggaagcccgcaatgttaccatggaaactgagtgaatggtttgaaatgaaactttgtcgtgtacttaggaagtaaatatcttttgaattanaaaaagtgttgg

SEQ ID NO: 633 - DNA, 402 bp, Homo sapiens
  misc_feature 278, 387: n = A,T,C or G
gcggagtcgggtgggttggcggctataaagctggtagcgaaggggaggcgccgcggactgtcctttcgtggctcactccctttcctctgctgccgctcggtcacgcttgctctttcaccatgcctggatcacttcctttgaatgcagaagcttgctggccaaaagatgtgggaattgttgcccttgagatctattttccttctcaatatgttgatcaagcagagttggaaaaatatgatggtgtagatgctggaaagtataccattggcttgggccangccaagatgggcttctgcacagatagagaagatattaactctctttgcatgactgtggttcagaatcttatggagagaaataacctttcctatgattgcattgggcggntggaagttggaacag

SEQ ID NO: 634 - DNA, 386 bp, Homo sapiens
  misc_feature 27, 354, 363, 368, 369, 375: n = A,T,C or G
tgcaggtcgacactagtggatccaaanaattcggcacgaggctggcaagaagagacgaggcccggctgtggagcaactgaaccgggtgactgtcccaagctggactccctggtggcccagcagctgcagagcaagaatgagtgtggaatccttgccgaccccaaggggcccttccgggagtgccatagcaagctggacccccagggtgccgtgcgcgactgtgtctatgaccgctgcctgctgccaggccagtctgggccactgtgtgacgcactggccacctatgctgctgcatgccaggctgctggagccacagtgcacccctggaggagtgaagaactttgcccacttganctgccaccncacanncctatnaggcgtgttct

SEQ ID NO: 635 - DNA, 404 bp, Homo sapiens
gccaccacttcgtagtgttttggaacaaaccaagttaaagaaagaagatatttatgcagtggagatagttggtggtgctacacgaatccctgcggtaaaagagaagatcagcaaatttttcggtaaagaacttagtacaacattaaatgctgatgaagctgtcactcgaggctgtgcattgcagtgtgccatcttatcgcctgctttcaaagtcagagaattttctatcactgatgtagtaccatatccaatatctctgagatggaattctccagctgaagaagggtcaagtgactgtgaagtcttttccaaaaatcatgctgctcctttctctaaagttcttacattttatagaaaggaacctttcactcttgaggcctactacagctctcctcaggatttgc

SEQ ID NO: 636 - DNA, 403 bp, Homo sapiens
  misc_feature 321: n = A,T,C or G
gctcactggtccccagtgccctgctggagcaagcctatgctgtgcagatggacttcaacctgctagtggatgctgtcagccagaacgctgccttcctggagcaaactctttccagcaccatcaaacaggatgactttaccgctcgtctctttgacatccacaagcaagtcctaaaagagggcattgcccagactgtgttcctgggcctgaatcgctcagactacatgttccagcgcagcgcagatggctccccagccctgaaacagatcgaaatcaacaccatctctgccagctttgggggcctggcctcccggaccccanctgtgcaccgacatgttctcagtgtcctgagtaagaccaaagaagctggcaagatcctctctaataatcccagcaagggact

SEQ ID NO: 637 - DNA, 441 bp, Homo sapiens
  misc_feature 24: n = A,T,C or G
aggtcgacactagtggatccaaanaattcggcacgaggagagagaccctaaaagcaaaaatagaagggatgacccaaagtctgagaggtctggaattagatgttgttactataaggtcagaaaaagaaaatctgacaaatgaattacaaaaagagcaagagcgaatatctgaattagaaataataaattcatcatttgaaaatattttgcaagaaaaagagcaagagaaagtacagatgaaagaaaaatcaagcactgccatggagatgcttcaaacacaattaaaagagctcaatgagagagtggcagccctgcataatgaccaagaagcctgtaaggccaaagagcagaatcttagtagtcaagtagagtgtcttgaacttgagaaggctcagttgctacaaggccttgatgaggccaaaaataattatattgtttgca

SEQ ID NO: 638 - DNA, 404 bp, Homo sapiens
  misc_feature 324, 353, 371: n = A,T,C or G
gcgctgccgccgattccggatctcattgccacgcgcccccgacgaccgcccgacgtgcattcccgattccttttggttccaagtccaatatggcaactctaaaggatcagctgatttataatcttctaaaggaagaacagaccccccagaataagattacagttgttggggttggtgctgttggcatggcctgtgccatcagtatcttaatgaaggacttggcagatgaacttgctcttgttgatgtcatcgaagacaaattgaagggagagatgatggatctccaacatggcagccttttcttagaacaccaaagattgtctntggcaaagactataatgtaactgcaactncagctggcattatcacgntggggacgtcagaagaaggagaaagccgcttat

SEQ ID NO: 639 - DNA, 404 bp, Homo sapiens
  misc_feature 368, 375, 382, 384: n = A,T,C or G
gcatgtaccgagcacttcggctcctcgcgcgctcgcgtcccctcgtgcgggctccagccgcagccttagcttcggctcccggcttgggtggcgcggccgtgccctcgttttggcctccgaacgcggctcgaatggcaagccaaaattccttccggatagaatatgatacctttggtgaactaaaggtgccaaatgataagtattatggcgcccagaccgtgagatctacgatgaactttaagattggaggtgtgacagaacgcatgccaaccccagttattaaagcttttggcatcttgaaacgagcggccgctgaagtaaaccaggattatggtcttgatccaaaaattgctaatgcaataatgaangcagcanatgaagnanctgaaggtaaataaaatgat

SEQ ID NO: 640 - DNA, 401 bp, Homo sapiens
ggccaagtcagcttcttctgagagagtctctagaagacatgatgctacactcagctttgggtctctgcctcttactcgtcacagtttcttccaaccttgccattgcaataaaaaaggaaaagaggcctcctcagacactctcaagaggatggggagatgacatcacttgggtacaaacttatgaagaaggtctcttttatgctcaaaaaagtaagaagccattaatggttattcatcacctggaggattgtcaatactctcaagcactaaagaaagtatttgcccaaaatgaagaaatacaagaaatggctcagaataagttcatcatgctaaaccttatgcatgaaaccactgataagaatttatcacctgatgggcaatatgtgcctagaatcatgttt

SEQ ID NO: 641 - DNA, 404 bp, Homo sapiens
  misc_feature 170, 227, 252, 261, 285, 329, 341, 361, 367, 382, 386, 387,391, 395, 401: n = A,T,C or G
ggctcatcgcagacaccagccgacctaccggctttcggaccatggccaacctcgagcgtaccttcattgccatcaagccagatggcgtgcagcgcggcctggtgggcgagatcatcaaacgattcgagcagaaggggttccgctggtggccatgaagttccttcgggctnttgaagaacacctgaacagcattacatcgaccctgaacgaaccgtcctttctttccnggggctggtgaaatacatgaacttnggggccatngtgggcatgggcttgggaaggggntcaatggtggtggaaaaccggcccgaatgattcttggggggaanaacaaatccaanttgatttaaaaaccaggcanccattnccgggggggattttnttgnntttnaaanttgggnagg

SEQ ID NO: 642 - DNA, 366 bp, Homo sapiens
  misc_feature 26: n = A,T,C or G
tgcaggtcgacactagtggatccaantaattcggcacgaggagcaaaggcacatcttaaatggcaggggaactacccttgatacaaccatcagatctcatgagactcactgtcatgagaacagcagcatgggggtaacggccccatgattcaattacctcccactgagtccctcccacgacatatggggattatgggagctacaattcaagatgagatttaggtggggacacagccaaaccatttcaatagcataacaccaaaaaaggttatagagcagtaaaagggttgatggaccatgcatcagtaataataataataattataagtgatctttaaacattcatcaggtgccaagcctcgtgcc

SEQ ID NO: 643 - DNA, 403 bp, Homo sapiens
  misc_feature 145, 172, 174, 186, 187, 188, 193, 199, 200, 203, 205, 206,211, 213, 216, 218, 221, 229, 234, 239, 248, 251, 253, 256,257, 263, 264, 269, 272, 298, 314, 336, 339, 356, 365, 370,392, 394: n = A,T,C or G
gtgacctgatgagacagttaattatggccaatccacaaatgcagcagttgatacagagaaatccagaaattagtcatatgttgaataatccagatataatgagacaaacgttggaacttgccaggaatccacaatgatgcagganaagatgaagaaccaagacccaactttnancaacctaaaaannnttccnaggggnnttnanngtttnanggncnttntccccaanttttnagganccattgttnatngntgnncaaaannagttnggnggaaatccttttgtttccttggggancaatacatcctttggngaaggtagtcaaccttcccgtncanaaattagaaatcccctncccaatccntgggntccacaaacttcccaaagttantnagtttccac

SEQ ID NO: 644 - DNA, 403 bp, Homo sapiens
  misc_feature 117, 119, 124, 130, 131, 132, 136, 139, 141, 144, 148, 149,150, 155, 158, 159, 161, 163, 164, 165, 168, 169, 174, 176,177, 180, 183, 185, 193, 194, 199, 201, 203, 204, 209, 220,233, 235, 242, 248, 251, 265, 275, 282, 287, 294, 297: n = A,T,C or G
  misc_feature 307, 311, 373, 378: n = A,T,C or G
ggggatgacagccctaacaagaactgtttttgaatcgttgtgcagctccaggcaatagagtatgtgaagcgatttcagtagaatcacttactcatcctaaaagaaaacattattccnantaccntccttnnnattnccntnttntaannnaaacntanngntnnntgnntgttnannggnatnanctttaaanntgcantntnntttantcctccaaatntttttcggtttcntntgagaancaccanaanctttctttcccttntcttcagtanttgcaanagganacctccnttnaggactggcntagngaacgtaatccatgctttaactgccattaaacagccccatggttggattttttttttttttngagtnggctttccaaaaccttgtcaaaaac

SEQ ID NO: 645 - DNA, 405 bp, Homo sapiens
  misc_feature 205, 223, 262, 281, 339, 357, 369, 374, 387: n = A,T,C or G
gcgccttccaggccgcactccagagccaaaagagctccatggcggcggcggccaagcccaacaacctttccctggtggtgcacggaccgggggacttgcgcctggagaactatcctatccctgaaccaggcccaaatgaggtcttgctgaggatgcattctgttggaatcttgtggcttaaatgtcactactgggagtatgggcnaattgggaattttattgngaaaaacccatggggttggacatgaagttcggacagtcnaaaaagtgggatcatcggnaaagacctaaaaccaggtgatcggttgcatcacctgggctcccgaaaaatgataattntgaagatggccatacatntgtaccttcatnttttntggcacccccccnatacggaactttgcggtt

SEQ ID NO: 646 - DNA, 412 bp, Homo sapiens
  misc_feature 378: n = A,T,C or G
ggaacccagtgcctgcagccatggctcccggccagctcgccttatttagtgtctctgacaaaaccggccttgtggaatttgcaagaaacctgaccgctcttggtttgaatctggtcgcttccggagggactgcaaaagctctcagggatgctggtctggcagtcagagatgtctctgagttgacgggatttcctgaaatgttggggggacgtgtgaaaactttgcatcctgcagtccatgctggaatcctagctcgtaatattccagaagataatgctgacatggccagacttgatttcaatcttataagagttgttgcctgcaatctctatccctttgtaaagacaagtggcttctccaggtgtaactgttgaggangctgtgggagcaaattgacattggtgggagtaac

SEQ ID NO: 647 - DNA, 412 bp, Homo sapiens
  misc_feature 55, 56, 61, 63, 68, 79, 90, 136, 137, 159, 160, 163, 205,219, 223, 314, 373, 384, 388, 400: n = A,T,C or G
ggtcgcccggcgccccagcccggccgcggcgctccccgcctccccgctagcgcanncggcngntctgntcggctgattnccagctatganacaaggagaatgaaaatatgaagaaaaagctgaacaaaaaagttanntagctaaaacaggacttgcagnnttnaaaacaggtccttgatggcaaagaagaggttgagaaacaacntagagaaaatattnaaantctaaattccatggtagaacgccaagagaaagatcttggccgtcttcaggtagacatggatgaacttgaagaaaagaaccgaagtattcangctgcctggatagtgcatacaaagaacttactgatctttacaaagccaatgctgcaaangatagtgaggnacangaagctgctctnaccgtgaaatga

SEQ ID NO: 648 - DNA, 413 bp, Homo sapiens
  misc_feature 158, 165, 181, 196, 205, 211, 220, 269, 271, 278, 279, 281,284, 298, 300, 304, 307, 308, 311, 312, 323, 335, 346, 353,354, 359, 382, 385, 387, 389, 391, 396, 397, 398, 399, 404: n = A,T,C or G
ggtcgcccggcgccccagcccggccgcggcgctccccgcctccccgctagcgcagcccggcggctctgcccggctgccgcccggcatgaacatcatggatttcaacgtgaagaaacttggcgggccgaccgggcaccttttcttaagccggcccgtgnaatttanaaaaaaaaaacttggncaagcaaaaaaaaanaaaattggnccttancttgaaaancttcttaacaaaacttaatggtccaaaatattgaccgaaaaaaaaatgnancaaaccnnantgnttttgcacccaatncnaatnccnngannaaaaaaattgnttattaaaaacntgaataaaaanccccaannctatnaacaaccccgaactttttggacnatntntnantgatnnnngaacntaatttggc

SEQ ID NO: 649 - DNA, 409 bp, Homo sapiens
  misc_feature 18, 34, 40, 281, 348, 351, 358, 365, 370, 386, 392: n = A,T,C or G
actagtggatccaaaganttcggcacgagggcanggtgtncgggcgggaaggggcacgggcacccccgcggtcctcgggaggctagagatcatggaagggaagtggttgctgtgtatgttactggtgcttggaactgctattgttgaggctcatgatggacatgatgatgatgtgattgatattgaggatgaccttgacgatgtcattgaagaggtagaagactcaaaaccagataccactgctcctccttcatctcccaaggttacttacaaagctccanttccaacaggggaagtatattttgctgattcttttgacagaggaactctgtcagggtggattttatncanagccaanaaagacnatccnatgatgaaaattgccnaatatnatggaaaagtgggaggt

SEQ ID NO: 650 - DNA, 413 bp, Homo sapiens
  misc_feature 404: n = A,T,C or G
ggcctgaggaccggcaacatggtgcggtcggggaataaggcagctgttgtgctgtgtatggacgtgggctttaccatgagtaactccattcctggtatagaatccccatttgaacaagcaaagaaggtgataaccatgtttgtacagcgacaggtgtttgctgagaacaaggatgagattgctttagtcctgtttggtacagatggcactgacaatcccctttctggtggggatcagtatcagaacatcacagtgcacagacatctgatgctaccagattttgatttgctggaggacattgaaagcaaaatccaaccaggttctcaacaggctgacttcctggatgcactaatcgtgagcatggatgtgattcacatgaaacaataggaaagaagtttgagaanaagcatatt

SEQ ID NO: 651 - DNA, 441 bp, Homo sapiens
  misc_feature 17: n = A,T,C or G
ctagtggatccaaaganttcggcacgaggcaaccagtgacactgcagggagaaatgctcttcacctggctgctaagtatggacatgcattgtgcctacaaaaacttctacagtacaattgtcccactgagcatgcagacctgcagggaagaactgcacttcacgatgccgcaatggcagattgtccttctagcatacagctgctttgtgaccatggggcctctgtgaatgccaaagatgtagacgggcggacaccacttgttctggctactcagatgagtaggccaacaatgtgtcaactgctgatagatagaggagcggatgttaattccagagacaaacaaaacagaactgccctcatgctaggttgcgaatatggttgcagagatgcagtagaagtcttaattaaaaatgggtgctgatataagcttgctggatgcgc

SEQ ID NO: 652 - DNA, 412 bp, Homo sapiens
gcttctctctcctgtgcaaaatggcaactcttaaggaaaaactcattgcaccagttgcggaagaagaggcaacagttccaaacaataagatcactgtagtgggtgttggacaagttggtatggcgtgtgctatcagcattctgggaaagtctctggctgatgaacttgctcttgtggatgttttggaagataagcttaaaggagaaatgatggatctgcagcatgggagcttatttcttcagacacctaaaattgtggcagataaagattattctgtgaccgccaattctaagattgtagtggtaactgcaggagtcccgtcagcaagaaggggagagtcggctcaatctggtgcagagaaatggtaatgtcttcaaattcattattcctcagatccgcaagtacagtcctg

SEQ ID NO: 653 - DNA, 414 bp, Homo sapiens
gccagttcaagtccaccctgccggacgccgatagggagcgcgaggccatcctggccatccacaaggaggcccagaggatcgctgagagcaaccacatcaagctgtcgggcagcaacccctacaccaccgtcaccccgcaaatcatcaactccaagtgggagaaggtgcagcagctggtgccaaaacgggaccatgccctcctggaggagcagagcaagcagcagtccaacgagcacctgcgccgccagttcgccagccaggccaatgttgtggggccctggatccagaccaagatggaggagatcgggcgcatctccattgagatgaacgggaccctggaggaccagctgagccacctgaagcagtatgaacgcagcatcgtggactacaaagcccaacctggaccttgttgga

SEQ ID NO: 654 - DNA, 404 bp, Homo sapiens
gcatggcggagctgacggtggaggttcgcggctccaacggggctttctacaagggatttatcaaagatgtccacgaagactccctcacagttgtttttgaaaataattggcaaccagaacgccaggttccgtttaatgaagtgcgattaccaccaccacctgatataaaaaaagaaattagtgaaggagatgaagtagaggtatattcaagagcaaatgaccaagagccatgtggatggtggctggctaaagttcggatgatgaaaggcgagttttatgtcattgaatatgctgcttgtgatgccacttacaatgaaatagtcacatttgaacgacttcggcctgtcaatcaaaataaaactgtcaaaaaaaataccttctttaagtgcacagtggatgttcct

SEQ ID NO: 655 - DNA, 402 bp, Homo sapiens
gggcaagatcaccattagcaaatggaaattacatttgaaagccattagacttataggtgatgcaagcatctaagagagaggttaatcacactatagaggcataagtggtatcagttttcatttttctaattgtttaaactgtgttttataccagtgtttgcaagtaattgggtgttagcttgagatggttaaaggtggtttggggagggacttcgttgtaatggttttgctgtaaaaaatgtttccaactccgctgaaatgttgctgaaaagcatggtgctggtaacagttcaacaatccgtggctgctcattcttgcctactttactctcccactgaagcaggttagcgtttgaaggtggtatggaaaacctgcatgcctgttcaattcttttgtttcttc

SEQ ID NO: 656 - DNA, 416 bp, Homo sapiens
gaatcggcacgaggtcagccgcgaggtgtccggcatcaaggccgcctacgaggccgagctcggggatgcccgcaagacccttgactcagtagccaaggagcgcgcccgcctgcagctggagctgagcaaagtgcgtgaggagtttaaggagctgaaagcgcgcaataccaagaaggagggtgacctgatagctgctcaggctcggctgaaggacctggaggctctgctgaactccaaggaggccgcactgagcactgctctcagtgagaagcgcacgctggagggcgagctgcatgatctgcggggccaggtggccaagcttgaggcagccctaggtgaggccaagaagcaacttcaggatgagatgctgcggcgggtggatgctgagaacaggctgcagaccatgaaggaggaac

SEQ ID NO: 657 - DNA, 402 bp, Homo sapiens
  misc_feature 150, 153, 154: n = A,T,C or G
gctccaagcagacacaatggtaagaatggtgcctgtcctgctgtctctgctgctgcttctgggtcctgctgtcccccaggagaaccaagatggtcgttactctctgacctatatctacactgggctgtccaagcatgttgaagacgtccncgnntttcaggcccttggctcactcaatgacctccagttctttagatacaacagtaaagacaggaagtctcagcccatgggactctggagacaggtggaaggaatggaggattggaagcaggacagccaacttcagaaggccagggaggacatctttatggagaccctgaaagacattgtggagtattacaacgacagtaacgggtctcacgtattgcagggaaggtttggtttgtgagatcgagaataaca

SEQ ID NO: 658 - DNA, 404 bp, Homo sapiens
gcaagacgccacttcccctatcatagaagagcttatcacctttcatgatcacgccctcataatcattttccttatctgcttcctagtcctgtatgcccttttcctaacactcacaacaaaactaactaatactaacatctcagacgctcaggaaatagaaaccgttgaactatcctgcccgccatcatcctagtcctcatcgccctcccatccctacgcatcctttacataacagacgaggtcaacgatccctcccttaccatcaaatcaattggccaccaatggtactgaacctacgagtacaccgactacggcggactaatcttcaactcctacatacttcccccattattcctagaaccaaggcggacctgcgactccttgacgttgacaatcgagtagta

SEQ ID NO: 659 - DNA, 411 bp, Homo sapiens
ggcacgagggtcgccgttactccgaggagataccagtcggtagaggagaagtcgaggttagagggaactgggaggcactttgctgtctgcaatcgaagttgagggtgcaaaaatgcagagtaataaaacttttaacttggagaagcaaaaccatctccaagaaaagcatcatcaacatcaccaccagcagcagcaccaccagcagcaacagcagcagccgccaccaccgccaatacctgcaaatgggcaacaggccagcagccaaaatgaaggcttgactattgacctgaagaattttagaaaaccaggagagaagaccttcacccaacgaagccgtctttttgtgggaaatcttcctcccgacatcactgaggaagaaatgaggaaactatttgagaaatatggaaaggc

SEQ ID NO: 660 - DNA, 412 bp, Homo sapiens
ggcacgagggggatttgggtcgcagttcttgtttgtggatcgctgtgatcgtcacttaacaatgcagatcttcgtgaagactctgactggtaagaccatcaccctcgaggttgagcccagtgacaccatcgagaatgtcaaggcaaagatccaagataaggaaggcatccctcctgaccagcagaggctgatctttgctggaaaacagctggaagatgggcgcaccctgtctgactacaacatccagaaagagtccaccctgcacctggtgctccgtctcagaggtgggatgcaaatcttcgtgaagacactcactggcaagaccatcacccttgaggtcgagcccagtgacaccatcgagaacgtcaaagcaaagatccaggacaaggaaggcattcctcctgaccagcag

SEQ ID NO: 661 - DNA, 411 bp, Homo sapiens
ggcacgaggggagatcgatgatcttgccagtaatgtagagacagtgtctaaggccaagggaaacctcgagaagatgtgccgcaccctggaggaccaggtgagtgagctgaagtcaaaggaggaggaacagcagcgactgatcaacgacctgacaacccagagaggacgactgcagaccgaatccggtgaattttccaggcagcttgatgagaaggaagcgctggtatctcagttatcaaggggcaaacaggcattcactcaacagattgaggagctaaagaggcaacttgaagaggaagtaaaggccaagaacgcgctggcccacgccctgcagtcctcccgccatgactgtgacctgctgcgggaacagtacgaggaggagcaggagtctaaggctgaactgcagagggc

SEQ ID NO: 662 - DNA, 414 bp, Homo sapiens
ggcacgaggctcacaggaccagccactagcgcagcctcgagcgatggcctatgtccccgcaccgggctaccagcccacctacaacccgacgctgccttactaccagcccatcccgggcgggctcaacgtgggaatgtctgtttacatccaaggagtggccagcgagcacatgaagcggttcttcgtgaactttgtggttgggcaggatccgggctcagacgtcgccttccacttcaatccgcggtttgacggctgggacaaggtggtcttcaacacgttgcagggcgggaagtggggcagcgaggagaggaagaggagcatgcccttcaaaaagggtgccgcctttgagctggtcttcatagtcctggctgagcactacaaggtggtggtaaatggaaatcccttctatgagta

SEQ ID NO: 663 - DNA, 414 bp, Homo sapiens
  misc_feature 140, 167, 214, 320, 339, 391, 406: n = A,T,C or G
gcggcgctccttcctcctcggctcgcgtctcactcagtgtaccttctagtcccgccatggccgctctcacccgggacccccagttccagaagctgcagcaatggtaccgcgagcaccgctccgagctgaacctgcgccgnctcttcgatgccaacaaggaccgcttnaaccacttcagcttgaccctcaacaccaaccatgggcatatcctggnggattactccaagaacctggtgacggaggacgtgatgcggatgctggtggacttggccaagtccaggggcgtggaggccgaccgggagcggatgttcaatggtganaagatcaactacacccganggtcgagccgtgctgcacgtggctctgcggaaccggttcaaacacacccatnctgggagacggcaangatgtgat

SEQ ID NO: 664 - DNA, 411 bp, Homo sapiens
ggcacgaggcttagatgccgtgccatgctccacaaccatcaacaggaaccgcatgggccgagacaagaagagaaccttccccctttgctttgatgaccatgacccagctgtgatccatgagaacgcatctcagcccgaggtgctggtccccatccgctggacatggagatcgatgggcagaagctgcgagacgccttcacctggaacatgaatgagaagttgatgacgcctgagatgttttcagaaatcctctgtgacgatctggatttgaacccgctgacgtttgtgccagccatcgcctctgccatcagacagcagatcgagtcctaccccacggacagcatcctggaggaccagtcagaccagcgcgtcatcatcaagctgaacatccatgtgggaaacatttccctg

SEQ ID NO: 665 - DNA, 409 bp, Homo sapiens
ggcacgagggcgaatcgcagcttctgagaccagggttgctccgtccgtgctccgcctcgccatgacttcctacagctatcgccagtcgtcggccacgtcgtccttcggaggcctgggcggcggctccgtgcgttttgggccgggggtcgcttttcgcgcgcccagcattcacgggggctccggcggccgcggcgtatccgtgtcctccgcccgctttgtgtcctcgtcctcctcggggggctacggcggcggctacggcggcgtcctgaccgcgtccgacgggctgctggcgggcaacgagaagctaaccatgcagaacctcaacgaccgcctggcctcctacctggacaaggtgcgcgccctggaggcggccaacggcgagctagaggtgaagatccgcgactggtac

SEQ ID NO: 666 - DNA, 411 bp, Homo sapiens
ggcacgaggtgagctgaaccaagaaggaggagggggtcgggcctccgaggaaggcctagctgctgctgctgccaggaattccaggttggaggggcggcaacctcctgccagccttcaggccactctcctgtgcctgccagaagagacagagcttgaggagagcttgaggagagcaggaaagcagcctcccccgttgcccctctggatccactgcttaaatacggacgaggacagggccctgtctcctcagcttcaggcaccaccactgacctgggacagtgaatcgacaatgccgtcttctgtctcgtggggcatcctcctgctggcaggcctgtgctgcctggtccctgtctccctggctgaggatccccagggagatgctgcccagaagacagatacatcccaccatga

SEQ ID NO: 667 - DNA, 412 bp, Homo sapiens
ggcacgaggattatccagaaccttgagaaagacagacaaaaattggtcagcagccaggagcaagacagagaacagttaattcagaagcttaattgtgaaaaagatgaagctattcagactgccctaaaagaatttaaattggagagagaagttgttgagaaagagttattagaaaaagttaaacatcttgagaatcaaatagcaaaaagtcctgccattgactctaccagaggagattcttcaagcttagttgctgaacttcaagaaaagcttcaggaagaaaaagctaagtttctagaacaacttgaagagcaagaaaaaagaaagaatgaagaaatgcaaaatgttcgaacatctttgattgcggaacaacagaccaattttaacactgttttaacaagagagaaaatga

SEQ ID NO: 668 - DNA, 411 bp, Homo sapiens
  misc_feature 14, 26, 28, 29, 34, 59, 66, 71, 85, 86, 87, 88, 100, 124,128, 129, 130, 138, 145, 154, 155, 157, 160, 162, 173, 179,186, 189, 190, 191, 198, 199, 200, 201, 206, 218, 219, 221,223, 230, 244, 252, 258, 259, 275, 282, 289, 298, 300: n = A,T,C or G
  misc_feature 301, 303, 308, 309, 313, 316, 317, 318, 320, 323, 324, 334,349, 350, 353, 355, 359, 363, 364, 368, 373, 381, 382, 383,399, 402, 403, 406, 407: n = A,T,C or G
ggcacgagggtctngggcgcgctcanannagatnatcaacctgcgagaggtcagcaccngcttccncctgncacccggggagtannnnttaattgtgaanaagatgaaagctattcagacttgncctnnnataatttnaattggngaggagaanntnttntnatcaaaagttnttttanaaaaagntannncatcttnnnntaatnaaagtattacannantnactgccnattgactttaccanaagagaangcttcnnggctttgttgctgaancttaatnaaaaggntatggggantnnanaaaanntaanttnnntnganntaatctttgnttgcagcttatcatnnttngntatnaaannaganaatanttctaatnnntgttttcgaatctatnatnnctnntttt

SEQ ID NO: 669 - DNA, 412 bp, Homo sapiens
ggcacgagggcagagaaaccagattctctctcagcagttacagcagatggaagctgagcataatactttgaggaacactgtggaaacagaaagagaggagtccaagattctactggaaaagatggaacttgaagtggcagagagaaaattatccttccataatctgcaggaagaaatgcatcatcttttagaacagtttgagcaagcaggccaagcccaggctgaactagagtctcggtatagtgctttggagcagaagcacaaagcagaaatggaagagaagacctctcatattttgagtcttcaaaagactggacaagagctgcagtctgcctgtgatgctctaaaggatcaaaattcaaagcttctccaagataagaatgaacaggcagttcagtcagcccagaccatt

SEQ ID NO: 670 - DNA, 411 bp, Homo sapiens
  misc_feature 154, 352, 373: n = A,T,C or G
ggcacgaggagagggacttccagagaagctggttataaaaaaccagcaatttcacaaggaacgagagcagccacccagatttgcacagcctggctcctttgagtatgaatatgccatgcgctggaaggcactcattgagatggagaagcagcancaggaccaagtggaccgcaacatcaaggaggctcgtgagaagctggagatggagatggaagctgcacgccatgagcaccaggtcatgctaatgagacaggatttgatgaggcgccaagaagaacttcggaggatggaagagctgcacaaccaagaggtgcaaaaacgaaagcaactggagctcaggcaggaggaagancgcaggcgccgtgaagaaganatgcggcggcagcaagaagaaatgatgcggcgacagca

SEQ ID NO: 671 - DNA, 411 bp, Homo sapiens
  misc_feature 160: n = A,T,C or G
ggcacgagggcaacatccagcctcctgacaaggtgatccgggcgggccccgcaggaattttatcccctcaccggcctcacactagtatcgcatgtccactatccagaacctccaatctttcgacccctttgctgatgcaactaagggtgacgacttactnccggcagggactgaggattacattcatataagaatccagcaacggaacggcagaaagacactgactactgttcagggcattgcagatgattatgacaaaaagaaacttgtgaaagctttcaaaaagaaatttgcctgtaatggtactgtgattgaacatcctgaatacggagaggttattcagcttcaaggtgaccaaagaaaaaacatctgccagtttctcttggaggttggcattgtaaaggaggaaca

SEQ ID NO: 672 - DNA, 409 bp, Homo sapiens
ggcacgaggcccactccaccttactaccagacaaccttagccaaaccatttacccaaataaagtataggcgatagaaattgaaacctggcgcaatagatatagtaccgcaagggaaagatgaaaaattataaccaagcataatatagcaaggactaacccctataccttctgcataatgaattaactagaaataactttgcaaggagagccaaagctaagacccccgaaaccagacgagctacctaagaacagctaaaagagcacacccgtctatgtagcaaaatagtgggaagatttataggtagaggcgacaaacctaccgagcctggtgatagctggttgtccaagatagaatcttagttcaactttaaatttgcccacagaaccctctaaatccccttgtaaatt

SEQ ID NO: 673 - DNA, 412 bp, Homo sapiens
  misc_feature 16, 26, 30, 44: n = A,T,C or G
ggcacgaggggaaaanctgggccccntctncacagccgaccaanggcagcgggctctgcccggcgccgctttctgcgacctggccgtcagccccacgtcgccggcctggaggggcaaagaggacgagggggccgcggcttcctccggggaccttggcttgcctggattgccaggagctggaagttgacattgagtctaggctgaggatggaaggtgtggagctgaaggaagaatggcaggatgaagattttccaatacctttaccagaagatgacagcattgaagcagatacactagatggaactgatccagacagacagcctggctccttagaagttaatgggaacaaagtaaggaagaaactgatggccccagacatcagcctgaccctggatcctggtgaagactctct

SEQ ID NO: 674 - DNA, 413 bp, Homo sapiens
  misc_feature 391: n = A,T,C or G
gcacagcctcacttctaaccttctggaacccacccaccactgccaagctcactattgaatccacgccgttcaatgtcgcagaggggaaggaggttcttctactcgcccacaacctgccccagaatcgtattggttacagctggtacaaaggcgaaagagtggatggcaacagtctaattgtaggatatgtaataggaactcaacaagctaccccagggcccgcatacagtggtcgagagacaatataccccaatgcatccctgctgatccagaacgtcacccagaatgacacaggattctataccctacaagtcataaagtcagatcttgtgaatgaagaagcaaccggacagttccatgtatacccggagctgcccaagccctccatctncagcaacaactccaaccccgtg

SEQ ID NO: 675 - DNA, 411 bp, Homo sapiens
  misc_feature 167, 183, 316, 381: n = A,T,C or G
ggcacgaggtattgttgctccagacacagtgatccactgtgagggggagccaatcaagcgagaggatgaggaggaatccttgaatgaagtaggctatgatgacatcggtggttgcaggaagcagctagctcaaataaaggagatggtggagctgccactgagacatnctgcgctctttaaggngattggtgtaaagcctcctcggggaatcttgttgtatgggccttctgggacagggaagaccctgattgctcgagctgtggcaaatgaaactggagccttcttctttctgatcaatggtcctgaaatcattgancaaattggctggtgagtctgagagcaaccttcgtaaagcctttgaggaagctgaaaagaatgctnctgctatcatcttcatcgatgaacttgatg

SEQ ID NO: 676 - DNA, 413 bp, Homo sapiens
  misc_feature 56, 143, 173, 210, 267, 270, 350, 378, 389: n = A,T,C or G
ggcacgaggcgggagcggcgcaggcggccgagcgggactggctgggtcggctgggntgctggtgcgaggagccgcggggctgtgctcggcggccaaggggacagcgcgtgggtggccgaggatgctgcggggcggtagctccngcgcccctccttggtgactgcttgcgccgngcctcacacagccgaaggcgggctcggcgcacagtcngctgctccgcgctcgcgcccggcggcgctccaggtgctgacagcgcgagagagcgcnggncctcaggagcaaggcgaatgtatgacaacatgtccacaatggtgtacataaaggaagacaagttggagaagcttacacangatgaaattattttctaagacaaaagcnagtaaattcanggggcctgggaaagctttgaagaa

SEQ ID NO: 677 - DNA, 410 bp, Homo sapiens
ggcacgagggccaagtcagcttcttctgagagagtctctagaagacatgatgctacactcagctttgggtctctgcctcttactcgtcacagtttcttccaaccttgccattgcaataaaaaaggaaaagaggcctcctcagacactctcaagaggatgggggagatgacatcacttgggtacaaacttatgaagaaggtctcttttatgctcaaaaaagtaagaagccattaatggttattcatcacctggaggattgtcaatactctcaagcactaaagaaagtatttgcccaaaatgaagaaatacaagaaatggctcagaataagttcatcatgctaaaccttatgcatgaaaccactgataagaatttatcacctgatgggcaatatgtgcctagaatcatgttt

SEQ ID NO: 678 - DNA, 410 bp, Homo sapiens
ggcacgaggaattaatgaagtctttaatgaacttatattagatgtgttaaagcagggttacatgatgaaaaagggccacagacggaaaaactggactgaaagatggtttgtactaaaacccaacataatttcttactatgtgagtgaggatctgaaaggataagaaaggagacattctcttggatgaaaattgctgtgtagagtccttgcctgacaaagatggaaagaaatgcctttttctcgtaaaatgttttgataagacttttgaaatcagtgcttcagataagaagaagaaacaggagtggattcaagccattcattctactattcatctgttgaagctgggcagccctccaccacacaaagaagcccgccagcgtcggaaagaactccggaagaagcagctggct

SEQ ID NO: 679 - DNA, 410 bp, Homo sapiens
  misc_feature 353: n = A,T,C or G
ggcacgagggagagagaatagttcgagtttttttttttttttattgcaagcatatttcttttaatgactccagtaaaattaagcatcaagtaaacaagtggaaagtgacctacacttttaacttgtctcactagtgcctaaatgtagtaaaggctgcttaagttttgtatgtagttggattttttggagtccgaaggtatccatctgcagaaattgatgcccaaattgaatttggattcaagtggattctaaatactttgcttatcttgaagagagaagcttcataaggaataaacaagttgaatagagaaaacactgattgataataggcattttagtgggctttttaatgntttctgctgtgaaacatttcaagatttattgatttttttttttcactttccccatca

SEQ ID NO: 680 - DNA, 410 bp, Homo sapiens
ggcacgaggcaattctggaaacaatgggaacaatggaaaagagagagaggactcctggaaaggagcttctgttcagaaatcaactgggtcaaaaaatgactcttgggacaacaataacaggtctacgggtgggtcctggaactttggcccccaggactctaatgacaacaaatggggtgaagggaacaaaatgacatctggggtctctcagggagaatggaaacagccgactgggtctgatgagttgaaaattggagaatggagtggtccaaaccaaccaaattctagcactggagcatgggacaatcaaaagggccaccccctccctgaaaaccaaggcaatgcccaggctccctgttggggaagatcttccagctccacaggaagtgaagttggaggtcaaagcactg

SEQ ID NO: 681 - DNA, 402 bp, Homo sapiens
gccggagcctaccctgccactggcccctatggcgcccctgctgggccactgattgtgccttataacctgcctttgcctgggggagtggtgcctcgcatgctgataacaattctgggcacggtgaagcccaatgcaaacagaattgctttagatttccaaagagggaatgatgttgccttccactttaacccacgcttcaatgagaacaacaggagagtcattgtttgcaatacaaagctggataataactggggaagggaagaaagacagtcggttttcccatttgaaagtgggaaaccattcaaaatacatgtactggttgaacctgaccacttcaaggttgcagtgaatgatgctcacttgttgcagtacaatcatcgggttaaaaaactcaatgaaatc

SEQ ID NO: 682 - DNA, 401 bp, Homo sapiens
gggcgagcggagttagcagggctttactgcagagcgcgccgggcactccagcgaccgtggggatcagcgtaggtgagctgtggccttttgcgaggtgctgcagccatagctacgtgcgttcgctacgaggattgagcgtctccacccatcttcttgtgcttcaccatctacataatgaatcccagtatgaagcagaaacaagaagaaatcaaagagaatataaagaatagttctgtcccaagaagaactctgaagatgattcagccttctgcatctggatctcttgttggaagagaaaatgagctgtccgcaggcttgtccaaaaggaaacatcggaatgaccacttaacatctacaacttccagccctggggttattgtcccagaatctagtgaaaataa

SEQ ID NO: 683 - DNA, 3255 bp, Homo sapiens
accgttgcggccgcaggggtctgggcagggctgggcagtgctgccggagcaaaagcggtagcgggagcccggccggagctgggtctggagacgccgtggcagcctgaacggagtgtgcgacggattgggaggtttgtctacagattttgagcgttcgaagttgacccctgactaagtatactttgctgctccctcagcctttgaaaaaatgtctgtcacatatgatgattccgttggagtagaagtgtccagcgacagcttctgggaggtcgggaactacaagcggactgtgaagcggatcgacgatggccaccgcctgtgcagcgacctcatgaactgcctgcatgagcgggcgcgcatcgagaaggcgtatgcgcagcagctcactgagtgggcccggcgctggaggcagcttgtggagaaagggccccagtacgggaccgtggagaaggcctggatggccttcatgtccgaggcagagagggtgagcgagctgcacctcgaggtgaaggcctcactgatgaacgatgacttcgagaagatcaagaactggcagaaggaagcctttcacaagcagatgatgggcggcttcaaggagaccaaggaagctgaggacggctttcggaaggcacagaagccctgggccaagaagctgaaagaggtagaagcagcaaagaaagcccaccatgcagcgtgcaaagaggagaagctggctatctcacgagaagccaacagcaaggcagacccatccttcaaccctgaacagctcaagaaattgcaagacaaaatagaaaagtgcaagcaagatgttcttaagaccaaagagaagtatgagaagtccctcaaggaactcgaccagggcacaccccagtacatggagaacatggagcaggtgtttgagcagtgccagcagttcgaggagaaacgccttcgcttcttccgggaggttctgctggaggttcagaagcacctaaacctgtccaatgtggctggttacaaagccatttaccatgacctggagcagagcatcagagcagctgatgcagtggaggacctgaggtggttccgagccaatcacgggccaggcatggccatgaactggccgcagtttgaggagtggtccgcagacctgattcgaaccctcagccggagagagaagaagaaggccactgacggcttcaccctgacgggcatcaaccagacaggcgaccagtttttgccgagtaagcccagcagcacccttaatgtcccgagcaaccccgcccagtctgcgcagtcacagtccagctacaaccccttcgaggatgaggacgacacgggcagcaccgtcagtgagaaggaggacattaaggccaaaaatgtgagcagctacgagaagacccagagctatcccaccgactggtcagacgatgagtctaacaaccccttctcctccacggatgccaatggggactcgaatccattcgacgacgacgccacctcggggacggaagtgcgagtccgggccctgtatgactatgaggggcaggagcatgatgagctgagcttcaaggctggggatgagctgaccaagatggaggacgaggatgagcagggctggtgcaagggacgcttggacaacgggcaagttggcctatacccggcaaattatgtggaggcgatccagtgatgagtcggggacaggccagcggggggacggaggcggcgggcccaggagcctcagccagccacgtgggcatccactccttttcctgcaagagatgatggttccattgctcttggcttcatggtgttcctggaaggcagatgagctggtcatttcgcctgggactcggcacctttccgagtgcagctggagggatctgagcgcaggaagacgcagaacaacagaaatagccgcccctccccgcccactgtgcctgttggcctatcatagatctctatgttcttgactttgtctctcctttccgagtcaatggtgggttacactgatcttgttccactgattactctctctgacgagtccatcacctgcaacttaaatgaacaagcttacatcccattttgagtgaagattttgaggtttttaatttaaaggctgtgtacagttatacttttttatacacctgttcatttctacttaaattatggcacagattgatgcgcaccagtcttgaggaaacgatctccctattcccttaccctgttactcagccacgccgtgtgtaggcttagcctcaggtggcagatgtttgaggaaaggaattatgccaggaaggtgggaccgggttatggtcgggtttctattgggaatgctctttgtgcttttgggcatctgaatggaagctttacatagaaccttaggtagaactcccccaaatcgccatatttaaaaattattttcactctattcttgcttaaaactgtactcttttgcaaattaacaattttatcactgattcagagttaaaaagaagactaacttttcaagcaaatgcatctgtaaagatgctttagattagactgtcatgtctcagtgtctatctgtatatattatttgatattcagagaatctaaagcactcgtctactgttttaatgagatttaacagcttttaacagtgagtttcgtttgtaaactgcttgaagtctgtggcattcaggcacacgtctggctggccggctgggtctcctcccgggctcagtgggcctggggcctctctgacgtggtgcctgctggagggaggctcgtcgtcaccagctgactgctggtccggcttctgaccggcctttgtcctggctccgtagcagaacactgtaaaagtgcccgcgtctttgcagtagttgcagatttcagtcgtcgtgttacttgtgcacaaacagaagctgggtcttacccgcagcacgagtgtctcgggctgcccggagtcgcccgggagcaggtgctgcagccagagttacgcgggggccacgcgggccggcgggggtggggggaacgtgggggaacctgtgtttcacgtgactcagcagtgcccgccgccgtcaccagctatgcattcactccgtttccagtgagcagatgtcttgcttggaaagtggacctgtgtctgtgtctgtcctgagaacttaccagcagaaatcctcatttctgtgctacggatttaccaaaaattgtcaagtctttttcagtttaacagttcctttacatgtgtagtatttgaggaaaaaaatcaataaacagttgatctcgtgcata

SEQ ID NO: 684 - DNA, 2993 bp, Mus musculus
ctggagtgtctgctgccaccccctcgtcctctgcagaaatgtctgtcacctacgatgactctgtgggagtggaagtgtccagcgacagcttctgggaggttgggaactacaaacggactgtgaagcggattgacgatggccaccgcctgtgtggtgacctcatgaactgtctgcatgagcgggcacgcatcgagaaggcgtatgcacagcagctcactgagtgggcccgacgctggaggcagctggtagagaagggaccacagtatgggaccgtggagaaggcctggatagctgtcatgtctgaagcagagagggtgagtgaactgcacctggaagtgaaggcatcactgatgaatgaagactttgagaagatcaagaactggcagaaggaagcctttcacaagcagatgatgggaggcttcaaggagaccaaagaagcagaggatggctttcggaaggcccagaagccctgggccaagaagctgaaagaggtggaagcggcaaagaaggcgcaccacacagcgtgcaaagaggagaagctggccatctcccgggaagccaacagcaaggcagatccatccctcaaccctgagcagctgaagaaactgcaagacaagatagaaaaatgcaaacaggacgttctaaagaccaaggacaagtatgagaagtccctgaaggagcttgatcagaccacaccccagtacatggagaacatggagcaggtgttcgagcagtgccagcagtttgaagagaagcgcctgcgcttcttccgggaggttctgctggaggttcagaagcacttggatctgtccaatgtggctagctataaaaccatttaccgggagctggagcagagcatcaaagcagcagatgcggtagaggacctgaggtggttccgggctaaccatgggccaggcatggctatgaactggccacagtttgaggagtggtctgcagatctgaatcgaactctcagccggagagagaagaagaaggctgttgacggtgtcaccctaacagggatcaaccagacaggtgaccagtctggacagaacaagcctggcagcaaccttagtgtcccgagcaaccccgcccagtccacgcagttacagtccagctacaaccccttcgaggacgaggacgacacgggcagcagcatcagtgagaaggaggacattaaggccaaaaatgtcagcagctatgagaagactcagacttaccccactgactggtctgatgatgagtctaacaaccctttctcctccacggatgccaacggggattcgaacccatttgatgaggacacgacctcaggaacagaagtgcgagttcgggccctctatgactatgaggggcaggaacatgatgagctgagcttcaaggctggggatgaactgaccaagatagaggatgaagatgaacagggttggtgcaagggacgtttagacagcggccaggttggcctatacccagccaactatgtcgaggctatccagtgacagcccatgggcaggctggcggagagacggaaatgggcagttcaggagctccgttagccttggcctgggcagtgacacctctagtgcccccagcagccatgtaggcatccactccacctgcaaaagacgatggctctgttgttcttggcttcctggtgtgctttgaaggcagatgagctggtgatttcattgggcacttggcccttttccaagcacatctgggcagatatagacacaggaagatagggtccaacagcgagagccaggcccctccccacccccaccagctctctctatcatggatctgcaccttctcgcccttgtctctcctgagtcatgacgggtcatactgattcttgttccactgatgattttctctgatgaggtcctatctgcaaggtcaatgagcagacttacatgccatcttctgagtaaagagtttgaggttttaatttaaaggcaatgtacagctatacttttttatatgctcttccagtcagttaaattatggcctacactgatctgagatgttctccacgtgagctgtcttcatttctctgtgctatgtccagatgtggggttgctgcagccggggttctatggcaagtgccagttgcagggctaaccttgtgcaacgttccccaacacttccacatacagaaattattttcactctatccctgcttcagtttttgcagattaacagttctattagtgatttggaaagttaacagtaagaagactaacttttcaaaacagttgcatctgtagattaagatgcttttacattagaccggttgtgtctcgatgtatatctgtatatattatttgataatcagaaaatctatagagttcacccactgttgaatgagagctggtggcttctgacagcagatctggtcaactgcttgaagcccatggcattgaagcacaggcacggctggttaacggtgcccacccagttaggatgtggctctggcctctgagtggagctgctgggaagactgattctcattggcctgggctccaagctcatgaccgagcactggaaaagctcctaggacttggtagtaatcgtagacttcacagtccctgtgtcactcactggagagctagagggaggggttcgacaccctccaccacacacacacacacacacacacacacacacacaagttcctccagttgcccttgtcctcaggtgcagtgggactgttgtgagccccagggatgggcacaaagaggacttttattttgttagctcggacagtgcagtggtgcacatcagcaacttgtatttcttcggtgtttggcacgagcactgtctcgctgtggctgtgtgtcatgagaacttaccagcagaaatccttgttcctaagctacagaatgaccaaaagctgtcaagtccttaatgtttagaaactccttaaaatgtatagtattttagaacaacaacaacaaaactcaataaacagttgatcttgtgtgtttgac

SEQ ID NO: 685 - protein, 486 aa, Homo sapiens
MSVTYDDSVGVEVSSDSFWEVGNYKRTVKRIDDGHRLCSDLMNCLHERARIEKAYAQQLTEWARRWRQLVEKGPQYGTVEKAWMAFMSEAERVSELHLEVKASLMNDDFEKIKNWQKEAFHKQMMGGFKETKEAEDGFRKAQKPWAKKLKEVEAAKKAHHAACKEEKLAISREANSKADPSFNPEQLKKLQDKIEKCKQDVLKTKEKYEKSLKELDQGTPQYMENMEQVFEQCQQFEEKRLRFFREVLLEVQKHLNLSNVAGYKAIYHDLEQSIRAADAVEDLRWFRANHGPGMAMNWPQFEEWSADLIRTLSRREKKKATDGFTLTGINQTGDQFLPSKPSSTLNVPSNPAQSAQSQSSYNPFEDEDDTGSTVSEKEDIKAKNVSSYEKTQSYPTDWSDDESNNPFSSTDANGDSNPFDDDATSGTEVRVRALYDYEGQEHDELSFKAGDELTKMEDEDEQGWCKGRLDNGQVGLYPANYVEAIQ

SEQ ID NO: 686 - DNA, 1571 bp, Homo sapiens
tgttaggttttattttaagtagaaataagtgtttgcatataggaaagttagttttcacttgtgttgattcttctgtttttaggatgccattggaggagaatctatgcctattccaactattgatacatcacgcaaaaagagactacccagtaaagaactaccagattcatcatctccagttccagcaaacaacatccgtgtcatcaaaaattccattcgactgacccttaatcggtaaaagcagtgcctcctcacttaagtgaacaagcaatcatttagtggcatagatgcagccacttgttttttaaatagaagtggctgtcatacgtgaaataaggtgaaagtgacagccttcagtctaataaccttgaagtggtttttgaactgtcaaactttgacctgtagatgctgtagcattctctcactgattgctacatacacttctctgaggatcacctgctgtcaaattgccatctacagtattacagctttgcatttgggggttttactgccttaactttcaatgcttgttatgggaaccagttcttagccacttggacactgataacaagtcctgaactccttttttttttttttttttgtgtttttctttttttgtcttatgttgtaatcattgtatagagctaaaaaaattgaaaacaaacaaaaaaattgtcttgtattttccaaatgttaatacatttactttagcattgaagccactttgaaacctgagataaatgaatgtgaggtatcttttctgctttcctcatttgtgtagatgtactgtctgttctgttgatttaaattatttttttccagattggcacatgaaatatttaaacttttttgtgtgcctttctgtccaaatgttgcatagttaccagggaagattagtccagtgattacataagagttgggcaccataaattctctatattttgcctcccatggaggcctttgaaatgcatctttattaaaaatcaaaatataaccaggatactgaaagtcagtatatgaatggtaaaattgttacatatcctatttcatgccattcttgttagttgactggtattttttactgaggagcaactcattccagcatcaacaataagataacctttaagtatggcacacttgtatttttgaggtgtaaaattaacttggcatgataattcctgatcattatttaccccacaacttcaaatagtttcttcacggactaggcatgcagaaataagcagtggattttattgaaacctaaaggcattttgaatgacattgttaccaaccattaattggctcaggacctttgtaatttttatttaactatatgagttgtctttttttacgctgcttttttcaatgcatttcttaatattttttaagtttcatgaatgcatgctcagtttattaaaatccataaccatgtaattcttgtaatatgttgattcagtgttttgtaaatgaagtcgtatgtattttcagagtatttttgtatgtactgtaagataccatcttttcaaagagaaacgtttaaaacctttaaaaaaaaaaaaaaaaaaaaaaaa

SEQ ID NO: 687 - protein, 73 aa, Homo sapiens
LGFILSRNKCLHIGKLVFTCVDSSVFRMPLEENLCLFQLLIHHAKRDYPVKNYQIHHLQFQQTTSVSSKIPFD

SEQ ID NO: 688 - DNA, 21 bp, Artificial Sequence
  PCR primer
cacgacgttgtaaaacgacgg

SEQ ID NO: 689 - DNA, 20 bp, Artificial Sequence
  PCR primer
cacaggaaacagctatgacc

SEQ ID NO: 690 - DNA, 5160 bp, Homo sapiens
atggtgccccctggtgtctacatgagaaatgccagctgtcatttccggaaggtcctgaacaagggttttcaaagctcccaagctctcagggtctgcaacaactactggattcgggagaaccccaatctgaacagtacccaggaggtgaatgagctgctgctgggaatggcctcccagatttcggagttggaggacaacatagtggttgaagatctgagggattactggcctggccctggcaaattctcccgtacagactatgtggccagcagcatccaacgtggccgagatatggggctgcccagctatagccaggccctgctggcctttgggctggacatcccaaggaactggagtgatctcaaccctaatgtggacccccaggtgctggaggccacagctgccctgtacaaccaggacctatcccagctagagctgctccttggcgggctcctggagagccatggggaccctggacccctgttcagtgccattgtcctcgaccagtttgtacggctgcgggatggtgaccgctactggtttgagaacaccaggaatgggctgttctccaagaaggagattgaagacatccgaaataccaccctgcgggacgtgctggtcgctgttatcaacattgaccccagtgccctgcagcccaatgtctttgtctggcataaaggtgcaccctgccctcaacctaagcagctcacaactgacggcctgccccagtgtgcacccctgactgtgcttgacttctttgaaggcagcagccctggttttgccatcaccatcattgctctctgctgccttcccttagtgagtctgcttctctctggagtggtggcctatttccggggccgagaacacaagaagctacaaaagaaactcaaagagagcgtgaagaaggaagcagccaaagatggagtgccagcgatggagtggccaggccccaaggagaggagcagtcccatcatcatccagctgctgtcagacaggtgtctgcaggtcctgaacaggcatctcactgtgctccgtgtggtccagctgcagcctctgcagcaggtcaacctcatcctgtccaacaaccgaggatgccgcaccctgctgctcaagatccctaaggagtatgacctggtgctgctgtttagttctgaagaggaacggggcgcctttgtgcagcagctatgggacttctgcgtgcgctgggctctgggcctccatgtggctgagatgagcgagaaggagctatttaggaaggctgtgacaaagcagcagcgggaacgcatcctggagatcttcttcagacacctttttgctcaggtgctggacatcaaccaggccgacgcagggaccctgcccctggactcctcccagaaggtgcgggaggccctgacctgcgagctgagcagggccgagtttgccgagtccctgggcctcaagccccaggacatgtttgtggagtccatgttctctctggctgacaaggatggcaatggctacctgtccttccgagagttcctggacatcctggtggtcttcatgaaaggctccccagaggataagtcccgtctaatgtttaccatgtatgacctggatgagaatggcttcctctccaaggacgaattcttcaccatgatgcgatccttcatcgagatctccaacaactgcctgtccaaggcccaactggccgaggtggtggagtctatgttccgggagtcgggattccaggacaaggaggagctgacatgggaggattttcacttcatgctgcgggaccatgacagcgagctccgcttcacgcagctctgtgtcaaaggtggaggtggaggtggaaatggtattagagatatctttaaacaaaacatcagctgtcgagtctcgttcatcactcggacacctggggagcgctcccacccccagggactggggccccctgccccagaagccccagagctgggaggccctggactgaagaagaggtttggcaaaaaggcagcagtgcccactccccggctgtacacagaggcgctgcaagagaagatgcagcgaggcttcctagcccaaaagctgcagcagtacaagcgcttcgtggagaactaccggaggcacatcgtgtgtgtggcaatcttctcggccatctgtgttggcgtgtttgcagatcgtgcttactactatggctttgccttgccaccctcggacattgcacagaccaccctcgtgggcatcatcctgtcacgaggcacggcggccagcgtctccttcatgttctcttatatcttgctcaccatgtgccgcaacctcataaccttcctgcgagagactttcctcaaccgctatgtgccttttgatgccgcagtggacttccaccgctggatcgccatggctgctgttgtcctggccattttgcacagtgctggccacgcagtcaatgtctacatcttctcagtcagcccactcagcctgctggcctgcatattccccaacgtctttgtgaatgatgggtccaagcttccccagaagttctattggtggttcttccagaccgtcccaggtatgacaggtgtgcttctgctcctggtcctggccatcatgtatgtcttcgcctcccaccacttccgccgccgcagcttccggggcttctggctgacccaccacctctacatcctgctctatgccctgctcatcatccatggcagctatgctctgatccagctgcccactttccacatctacttcctggtcccggcaatcatctatggaggtgacaagctggtgagcctgagccggaagaaggtggagatcagcgtggtgaaggcggagctgctgccctcaggagtgacctacctgcaattccagaggccccaaggctttgagtacaagtcaggacagtgggtgcggatcgcctgcctggctctggggaccaccgagtaccaccccttcacactgacctccgcgccccatgaggacacactcagcctgcacatccgggcagtggggccctggaccactcgcctcagggagatctactcatccccaaagggcaatggctgtgctggatacccaaagctgtaccttgatggaccgtttggagagggccatcaggagtggcataaatttgaggtgtcagtgttggtgggagggggcattggggtcaccccctttgcctccatcctcaaagacctggtcttcaagtcatccttgggcagccaaatgctgtgtaagaagatctacttcatctgggtgacacggacccagcgtcagtttgagtggctggctgacatcatccaagaggtggaggagaacgaccaccaggacctggtgtctgtgcacatttatgtcacccagctggctgagaagttcgacctcaggaccaccatgctatacatctgcgagcggcacttccagaaagtgctgaaccggagtctgttcacgggcctgcgctccatcacccactttggccgtccccccttcgagcccttcttcaactccctgcaggaggtccacccacaggtgcgcaagatcggggtgttcagctgcggccctccaggaatgaccaagaatgtagagaaggcctgtcagctcgtcaacaggcaggaccgagcccacttcatgcaccactatgagaacttctgagcctgtcctccctggctgctgcttccagtatcctgccttctcttctgtgcacctaagttgcccagccctgctggcaatctctccatcagaatccaccttaggcctcagctggagggctgcagagcccctcccaatattgggagaatattgacccagacaattatacaaatgagaaaaggcaggagactatgttctacaattgcagtgcatgatgattataagtccacctgtttatcaacggcaccattcctgcagccctccagacttcctgcccttagcaagtgcgcaaccagtcaggatctcccaaagaagataaagaccactcctcaccccagctcaagccatggcaggcgtggcaagcaaagtggggaggagacagtccctgcttgtgacaagtgtggaggtgaaaaggtacaatagtgcttgtctccgatagctccccacatctctaattgacttccacaaaatcgatgcgttgctttggtatttgcttggactgacatttgagggaggaggaggctgggatcctctggctgagaatctcctcagagcccagtgcagaagctgtgatgcttagaacctggacagcccgactgcctcaactctgtctccaggtctattccctccagctccaaaaggagcagccctacttctaccccttcccgtccccaaagtgtcagcaactttgaggagggcaccaggaaacaaagatgcctccccagccctgatattcttgatgtcaccagtgatacccactgccctgacccctgggcaggcccctctccgcatctactggagtggtccctgggctctggggctgaaggattccagcctctctgccagatattcagtactcgatctcaattcccctcttccacaagagttgggtgaccagctgtcctagtttgcccaggactctccctgttttagcactgaaagtctcttgccccaggaaaccccatcagtcccaggcagattgggacagctggtcaccttacgcaagagccaggctgaaacatcccctccatactcagctctttaacttttcttttcctttttcatcgggctctttcctaaaaagctgagctgtaaaatattttacatcgaggtataataaataatcatgtacatgttttaccaccacccaggtcaagacatagaatgtttcaacatttccatcaccccagaaactccccttgtacccccttccacttcgtctcccctagctcctagaagcaaccactgatgtgatttctaccaaatccagttttggtcctactaaatatactcttttgagactggcctcttttactcaccataatgcctttgtaattcatccatgctgttgtgtgtatcagcagtttgttccttttcattgctgagtagtattctattgtagagatgtaccacagtttgtttattcttctgttgatggacgtttgggttgtttctaattttgaatgattataaataaaaattctgtgagtgttcttgtacgtaaaaaaaaaaaaaaaaaaaaaaaaaaaa

SEQ ID NO: 691 - DNA, 2265 bp, Homo sapiens
atttgcctgtgtttagaagggtattactacaactcttctacatgtaagaaaggaaaggtattccctgggaagatttcagtgacagtatcagaaacatttgacccagaagagaaacattccatggcctatcaagacttgcatagtgaaattactagcttgtttaaagatgtatttggcacatctgtttatggacagactgtaattcttactgtaagcacatctctgtcaccaagatctgaaatgcgtgctgatgacaagtttgttaatgtaacaatagtaacaattttggcagaaaccacaagtgacaatgagaagactgtgactgagaaaattaataaagcaattagaagtagctcaagcaactttctaaactatgatttgacccttcggtgtgattattatggctgtaaccagactgcggatgactgcctcaatggtttagcatgcgattgcaaatctgacctgcaaaggcctaacccacagagccctttctgcgttgcttccagtctcaagtgtcctgatgcctgcaacgcacagcacaagcaatgcttaataaagaagagtggtggggcccctgagtgtgcgtgcgtgcccggctaccaggaagatgctaatgggaactgccaaaagtgtgcatttggctacagtggactcgactgtaaggacaaatttcagctgatcctcactattgtgggcaccatcgctggcattgtcattctcagcatgataattgcattgattgtcacagcaagatcaaataacaaaacgaagcatattgaagaagagaacttgattgacgaagactttcaaaatctaaaactgcggtcgacaggcttcaccaatcttggagcagaagggagcgtctttcctaaggtcaggataacggcctccagagacagccagatgcaaaatccctattcaagacacagcagcatgccccgccctgactattagaatcataagaatgtggaacccgccatggcccccaaccaatgtacaagctattatttagagtgtttagaaagactgatggagaagtgagcaccagtaaagatctggcctccggggtttttcttccatctgacatctgccagcctctctgaatggaagttgtgaatgtttgcaacgaatccagctcacttgctaaataagaatctatgacattaaatgtagtagatgctattagcgcttgtcagagaggtggttttcttcaatcagtacaaagtactgagacaatggttagggttgttttcttaattcttttcctggtagggcaacaagaaccatttccaatctagaggaaagctccccagcattgcttgctcctgggcaaacattgctcttgagttaagtgacctaattcccctgggagacatacgcatcaactgtggaggtccgaggggatgagaagggatacccaccatctttcaagggtcacaagctcactctctgacaagtcagaatagggacactgcttctatccctccaatggagagattctggcaacctttgaacagcccagagcttgcaacctagcctcacccaagaagactggaaagagacatatctctcagctttttcaggaggcgtgcctgggaatccaggaactttttgatgctaattagaaggcctggactaaaaatgtccactatggggtgcactctacagtttttgaaatgctaggaggcagaaggggcagagagtaaaaaacatgacctggtagaaggaagagaggcaaaggaaactgggtggggaggatcaattagagaggaggcacctgggatccaccttcttccttaggtcccctcctccatcagcaaaggagcacttctctaatcatgccctcccgaagactggctgggagaaggtttaaaaacaaaaaatccaggagtaagagccttaggtcagtttgaaattggagacaaactgtctggcaaagggtgcgagagggagcttgtgctcaggagtccagccgtccagcctcggggtgtaggtttctgaggtgtgccattggggcctcagccttctctggtgacagaggctcagctgtggccaccaacacacaaccacacacacacaaccacacacacaaatgggggcaaccacatccagtacaagcttttacaaatgttattagtgtccttttttatttctaatgccttgtcctcttaaaagttattttatttgttattattatttgttcttgactgttaattgtgaatggtaatgcaataaagtgcctttgttaaaaaaaaaaaaaaaaaa

SEQ ID NO: 692 - protein, 1210 aa, Homo sapiens
MVPPGVYMRNASCHFRKVLNKGFQSSQALRVCNNYWIRENPNLNSTQEVNELLLGMASQISELEDNIVVEDLRDYWPGPGKFSRTDYVASSIQRGRDMGLPSYSQALLAFGLDIPRNWSDLNPNVDPQVLEATAALYNQDLSQLELLLGGLLESHGDPGPLFSAIVLDQFVRLRDGDRYWFENTRNGLFSKKEIEDIRNTTLRDVLVAVINIDPSALQPNVFVWHKGAPCPQPKQLTTDGLPQCAPLTVLDFFEGSSPGFAITIIALCCLPLVSLLLSGVVAYFRGREHKKLQKKLKESVKKEAAKDGVPAMEWPGPKERSSPIIIQLLSDRCLQVLNRHLTVLRVVQLQPLQQVNLILSNNRGCRTLLLKIPKEYDLVLLFSSEEERGAFVQQLWDFCVRWALGLHVAEMSEKELFRKAVTKQQRERILEIFFRHLFAQVLDINQADAGTLPLDSSQKVREALTCELSRAEFAESLGLKPQDMFVESMFSLADKDGNGYLSFREFLDILVVFMKGSPEDKSRLMFTMYDLDENGFLSKDEFFTMMRSFIEISNNCLSKAQLAEVVESMFRESGFQDKEELTWEDFHFMLRDHDSELRFTQLCVKGGGGGGNGIRDIFKQNISCRVSFITRTPGERSHPQGLGPPAPEAPELGGPGLKKRFGKKAAVPTPRLYTEALQEKMQRGFLAQKLQQYKRFVENYRRHIVCVAIFSAICVGVFADRAYYYGFALPPSDIAQTTLVGIILSRGTAASVSFMFSYILLTMCRNLITFLRETFLNRYVPFDAAVDFHRWIAMAAVVLAILHSAGHAVNVYIFSVSPLSLLACIFPNVFVNDGSKLPQKFYWWFFQTVPGMTGVLLLLVLAIMYVFASHHFRRRSFRGFWLTHHLYILLYALLIIHGSYALIQLPTFHIYFLVPAIIYGGDKLVSLSRKKVEISVVKAELLPSGVTYLQFQRPQGFEYKSGQWVRIACLALGTTEYHPFTLTSAPHEDTLSLHIRAVGPWTTRLREIYSSPKGNGCAGYPKLYLDGPFGEGHQEWHKFEVSVLVGGGIGVTPFASILKDLVFKSSLGSQMLCKKIYFIWVTRTQRQFEWLADIIQEVEENDHQDLVSVHIYVTQLAEKFDLRTTMLYICERHFQKVLNRSLFTGLRSITHFGRPPFEPFFNSLQEVHPQVRKIGVFSCGPPGMTKNVEKACQLVNRQDRAHFMHHYENF

SEQ ID NO: 693 - protein, 277 aa, Homo sapiens
MAYQDLHSEITSLFKDVFGTSVYGQTVILTVSTSLSPRSEMRADDKFVNVTIVTILAETTSDNEKTVTEKINKAIRSSSSNFLNYDLTLRCDYYGCNQTADDCLNGLACDCKSDLQRPNPQSPFCVASSLKCPDACNAQHKQCLIKKSGGAPECACVPGYQEDANGNCQKCAFGYSGLDCKDKFQLILTIVGTIAGIVILSMIIALIVTARSNNKTKHIEEENLIDEDFQNLKLRSTGFTNLGAEGSVFPKVRITASRDSQMQNPYSRHSSMPRPDY

SEQ ID NO: 694 - DNA, 157 bp, Homo sapiens
aaatataaatgatatgttgaaaacttaaggaagcaaatgctacatatatgcaatataaaatagtaatgtgatgctgatgctgttaaccaaagggcagaataaataagcaaaatgccaaaaggggtcttaattgaaatgaaaatttaattttgttttt

SEQ ID NO: 695 - DNA, 241 bp, Homo sapiens
ctggcccgacctctggcctcctcttccctggctgaatgtaaatatttaccagcatttagaaaaaaggagaaaaaagacagaactaaacccgtttaggaaaaagggaccgagggacagcagtggttaagtaatccactgaggacctgaaggggaaaatggacttacctttctcatatacttggcctggctaggacactgggtgccagacagccttctgaggggattttctttctaaatgagg

SEQ ID NO: 696 - DNA, 188 bp, Homo sapiens
  misc_feature 11, 29, 30, 59, 62, 165: n = A,T,C or G
gcccatgatgncagagctggaagagaggnnacgtcagcagaggggccacctccatttgntgnagacaagcatagatgggattctggctgatgtgaagaacttggagaacattagggacaacctgcccccaggctgctacaatacccaggctcttgagcaacagtnaagctgccataaatatttctcaa

SEQ ID NO: 697 - DNA, 289 bp, Homo sapiens
  misc_feature 50, 86, 207: n = A,T,C or G
ctgcttggacttcaaagccctccgcctagccatctcagccaggctcaggntccttctcccacccatcaggccaagcaggacttgtnaaacatacacattcaagttcctagcacacagtaggtgctaagtgggaattgattataaacttgaattcttccatcaacaaatatctacctctcctgtccagcttgcctcagatcttcaggntctctcttctctgaggcagctaagcttctacatccttcatgaagtttcctttacttctcgacagaagacagttccctttagg

SEQ ID NO: 698 - DNA, 193 bp, Homo sapiens
  misc_feature 171: n = A,T,C or G
aaagtttgtgctataaaattgtgcaaatatgttaaggattgagacccaccaatgcactactgtaatatttcgcttcctaaatttcttccacctacagataatagacaacaagtctgagaaactaaggctaaccaaacttagatataaatcctaccaataaaatttttcagntttaagttttacagtttgattt

SEQ ID NO: 699 - DNA, 279 bp, Homo sapiens
  misc_feature 60, 126: n = A,T,C or G
ccttccccccccttccttatgagttctaacttagtaatttcaaatgtgaccttttatatntaagaccagtatagtaaacttagcccacagtggcaaataatgagtaatattgtaatatgttccagngggataccctccttgtcttgaattttggctttgacattctcaatggtgtcactgggctcgacctcaagggtgatggttttgccagtgagggtcttcacaaagatctgcatgtttgcgtccgcacgaccgccgccaccaaccagctcggccgcc

SEQ ID NO: 700 - DNA, 340 bp, Homo sapiens
  misc_feature 174: n = A,T,C or G
ctgtccaatgacaacaggaccctcactctactcagtgtcacaaggaatgatgtaggaccctatgagtgtggaatccagaacaaattaagtgttgaccacagcgacccagtcatcctgaatgtcctctatggcccagacgaccccaccatttccccctcatacacctattaccgnccaggggtgaacctcagcctctcctgccatgcagcctctaacccacctgcacagtattcttggctgattgatgggaacatccagcaacacacacaagagctctttatctccaacatcactgagaagaacagcggactctatacctgccaggccaataactcagcca

SEQ ID NO: 701 - DNA, 277 bp, Homo sapiens
  misc_feature 13, 29, 109, 117, 182: n = A,T,C or G
ccactggctgagntattggcctggcaggnatagagtccgctgttcttctcagtgatgttggagataaagagctcttgtgtgtgttgctggatgttcccatcaatcagcnaagaatantgtgcaggtgggttagaggctgcatggcaggagaggctgaggttcacccctggacggtaataggngtatgagggggaaatggtggggtcgtctgggccatagaggacattcaggatgactgggtcgctgtggtcaacacttaatttgttctggattccac

SEQ ID NO: 702 - DNA, 255 bp, Homo sapiens
  misc_feature 27, 42, 86: n = A,T,C or G
ctgcgcgtcgccaaagtgacaggcggngcggcctccaagctntctaagatccgagtcgtccggaaatccattgcccgtgttctcanagttattaaccagactcagaaagaaaacctcaggaaattctacaagggcaagaagtacaagcccctggacctgcggcctaagaagacacgtgccatgcgccgccggctcaacaagcacgaggagaacctgaagaccaagaagcagcagcggaaggagcggctgtacccg

SEQ ID NO: 703 - DNA, 224 bp, Homo sapiens
  misc_feature 13, 42, 43, 74, 89, 179, 210, 216: n = A,T,C or G
cctgtttggaggngctgctcgaaagggtttgccctgagactnnaagaagaagctgcgggaaggacagcaggggncctggggttttagcntctggcccaggagttatgtgtccataaccaaagggagcacagtctgcacccagctctcatcccatcggagctgctgcgactcccgcaggntcttccggaactggtttagcttgcccgcagnatcagnaaagtttg

SEQ ID NO: 704 - DNA, 445 bp, Homo sapiens
  misc_feature 251, 313, 392, 427: n = A,T,C or G
aggtaaaaagcagcctgggcaagagaagtgggtgggtttaggagaatccctttcgaaaaattcagagcattattattaatccttcttaaattaaatgcagggccaagcatgctgcacgtggaatctggacaattttttgataaactttaaggctgctaaataatttacagaaactgtgaatgcattttcattttacgaggcaaaagagaaaatattcaagattgcatagcaattttattttttgaaatggntatcctaaagaatttccttaaattcagattttgcaaaattcctactctccaagtcatcaagngaacactaaaagcaactttactcgtgaatacaggggactctttacgaggcatgcatttttcataaatctaggccaaagngaactaattgagatttaattctaaattcatcctgngatttctgcatataatat

SEQ ID NO: 705 - DNA, 107 bp, Homo sapiens
  misc_feature 8, 29, 32, 46, 47, 54, 62, 70, 91, 102, 103: n = A,T,C or G
atcacccnatttaattaaaaatccctggnctnaggacctacagcanngtactgnagaacttnagaacctnaattagccatttgccatcttnagagagtcttnnccat

SEQ ID NO: 706 - DNA, 113 bp, Homo sapiens
  misc_feature 22, 105: n = A,T,C or G
aaatagtttctaaaggcaaggncttgctatgttgcttaggctggttttgaaaagtcccttttggggggatgctttcactgcttcacttcctttctatgacagctnagggaatc

SEQ ID NO: 707 - DNA, 283 bp, Homo sapiens
  misc_feature 47, 127, 132, 135, 159, 208, 221, 223, 236, 276: n = A,T,C or G
ctgctccaaggccatcaagatcttcatggggaggacggagctgaagntggaagacaagcaccgtgtggtgatccagcgtgatgagggtcaccacgtggcctacaccacgcgggaggtgggccagtanctggnggnggagtccagcacgggcatcatcgncatctgggacaagaggaccaccgtgttcatcaagctggctccctcctanaagggcaccgtgngnggcctgtgtgggnactttgaccaccgctccaacaacgacttcaccacgcgggnccacatg

SEQ ID NO: 708 - DNA, 341 bp, Homo sapiens
  misc_feature 182: n = A,T,C or G
ctgtccaatgacaacaggaccctcactctactcagtgtcacaaggaatgatgtaggaccctatgagtgtggaatccagaacaaattaagtgttgaccacagcgacccagtcatcctgaatgtcctctatggcccagacgaccccaccatttccccctcatacacctattaccgtccaggggngaacctcagcctctcctgccatgcagcctctaacccacctgcacagtattcttggctgattgatgggaacatccagcaacacacacaagagctctttatctccaacatcactgagaagaacagcggactctatacctgccaggccaataactcagccag

SEQ ID NO: 709 - DNA, 376 bp, Homo sapiens
  misc_feature 62, 110, 115, 116, 155, 167, 203, 218, 286, 320, 328, 337: n = A,T,C or G
ccaagtccaggggcgtggaggccgcccgggagcggatgttcaatggtgagaagatcaactanaccgagggtcgagccgtgctgcacgtggctctgcggaaccggtcaaanacacnnatcctggtagacggcaaggatgtgatgccagaggtcaanaaggttctgganaagatgaagtctttctgccagcgtgtccggagcggngactggaaggggtanacaggcaagaccatcacggacgtcatcaacattggcattggcggctccgacctgggacccctcatggngactgaagcccttaagtcatactcttcaggaggnccccgcgnctgggatgnctccaacattgatggaactcacattgccaaaaccctggc

SEQ ID NO: 710 - DNA, 232 bp, Homo sapiens
  misc_feature 42, 52, 62, 79, 83, 106, 134: n = A,T,C or G
ctgctgtatattcagcattgtgggaggagctgtgaaagacanagaacagtanagggtgtggnccctgccctcgagaggnttanagtctaggtggagaaacgggaancaggacacatggggagccgagagaaaanagtccaggccagtatgttacaggagctggaaggtgtttggggtcagaccccaatactccaagtacactaagcacttcagtgcctccaggggctcaacg

SEQ ID NO: 711 - DNA, 317 bp, Homo sapiens
  misc_feature 227: n = A,T,C or G
caggtaaaatagatttaatttaggaaagctcattttatatgagtttccaactaattattagagtcagaaacaaagaaaataaaatcagagaaaatcctctgtagaaaaaatacacaaagaacatttctacatgtgaaaaaacagtaaacagtgttaacatccaagttattagtctcaattccacgtctcctagtgaacaccactatcaaccttgagatctgatttgntcttgtcattcttcactgagtagatgaaatatgttaaggtgtctttttcattcactggaatagacctaaagtggcaaccaactatctcaa

SEQ ID NO: 712 - DNA, 154 bp, Homo sapiens
  misc_feature 2, 16, 30, 33, 55, 108, 130: n = A,T,C or G
tntgtagaaaaaatanacaaagaacatttntanatgtgaaaaaacagtaaacagngttaacatccaagttattagtctcaattccacgtctcctagtgaacaccactntcaaccttgagatctgatttgntcttgtcattcttcactgagtaga

SEQ ID NO: 713 - DNA, 177 bp, Homo sapiens
  misc_feature 102, 129: n = A,T,C or G
ccattcagaggtagaagatggaggggcggcagattctggcagggcagcagagggctctatgcacgggtttcaaacctgttttccacactctgtctttgcagntttggtaattctgtggtctatttatanagatattaaaatcttgtttataaaaaaaaaaaaaaaaaaaaaaaaaaa

SEQ ID NO: 714 - DNA, 216 bp, Homo sapiens
  misc_feature 46, 88, 200: n = A,T,C or G
ctgtgtttcggctataaaaaggcggctgaaagaaggggaaaattantttagacttaattggaagtttcatatggcacacattaccagnagagaaaaagatataaacggcaataaatattaggctcgatttgagaaactctccccacctcaatgctttcttttcccttgctatttaagggtctactttgcaacccgtgtgngtgtttgtgtgtgtgt

SEQ ID NO: 715 - DNA, 376 bp, Homo sapiens
  misc_feature 211, 294, 333, 352: n = A,T,C or G
ctgtgcgagtgtaccggatgcttccacctctcaccaagaaccagagaaaagaaagaaagtcgaagtccagccgagatgctaagagcaaggccaagaggaagtcatgtggggattccagccctgataccttctctgatggactcagcagctccactctgcctgatgaccacagcagctacacagttccaggctacatgcaggacttggaggnggagcaggccctgactccagctacaacagatgaggatgaggaagggaaattacctgaggacatcatgaagctcttggagcagncggagtggcagccaacaagcgtggatgggaaggggtacntactcaatgaacctggagnccagcccacctctgtctatggaga

SEQ ID NO: 716 - DNA, 96 bp, Homo sapiens
  misc_feature 59, 74, 77: n = A,T,C or G
aaactttttatttgcatattaaaaaaattgtgcattccaataattaaaatcatttgaanaaaaaaaaaatggcnctntgattaaactgcattacag

SEQ ID NO: 717 - DNA, 366 bp, Homo sapiens
  misc_feature 104, 224, 233, 343: n = A,T,C or G
gatggaaaggatacagatgacatcaagatccccatgctgttcttattcagcaaagaaggaagtatcatactggatgccatccgggaatatgaggaggtagaagngctcctctctgataaagcaaaagatcgagatcctgaaatggaaaatgaagaacaaccatcctctgaaaatgattctcagaatcagagtggtgaacagatttcatcaagttctcaggaggntgatttggntgatcaagagtcttctgaggaaaattctctaaattctcacccagaatcattatctctagcagatatggacaatgctgcaagcatttccccttctgaacagacttctaatnccacagaaaaccatgagactaca

SEQ ID NO: 718 - DNA, 200 bp, Homo sapiens
  misc_feature 17: n = A,T,C or G
aaacatctcacatatanaaaataggtacaatttaatttttctgcttgcccaagaaacaaagcttctgtggaaccatggaagaagatgaaaatgagactggcaaagaacaaatgctgaatctgaagaagatttgggcaaataatctgcatacttttaattgggaataagatggaaaatatgaatgctaaatcaaatttttt

SEQ ID NO: 719 - DNA, 336 bp, Homo sapiens
  misc_feature 71, 260, 314: n = A,T,C or G
ctgtctcacactttgcaagctgtgagagacacatcagagccctgggcactgtcactgcttgcagcctgagngtaactccctccttttctatctgagctcttcctcctccacatcacggcagcgaccacagctccagtgatcacagctccaaggagaaccaggccagcaatgatgcccacgatggggatggtgggctgggaagacagctcccatctcagggtgaggggcttgggcagaccctcatgctgcacatggcaggngtatctctgctcctctccagaaggcaccaccacagccgcccacttctggaaggntccatccccttgcaggccttgg

SEQ ID NO: 720 - DNA, 167 bp, Homo sapiens
  misc_feature 31, 46, 47: n = A,T,C or G
ggagagtgctagtgaggcggccaagaagtanatggaggagaatgannagctcaagaagggagctgctgttgacggaggcaagttggatgtcgggaatgctgaggtgaagttggaggaagagaacaggagcctgaaggctgacctgcagaagctaaaggacgagctgg

SEQ ID NO: 721 - DNA, 134 bp, Homo sapiens
  misc_feature 39, 56, 102: n = A,T,C or G
cctagtatgaggagcgttatggagtggaagtgaaatcanatggctaggccggaggncattaggagggctgagagggcccctgttaggggtcatgggctgggntttacgtgcgtgaggaggggcggagcttgcag

SEQ ID NO: 722 - DNA, 353 bp, Homo sapiens
  misc_feature 214, 290, 299: n = A,T,C or G
aaaaatatatacaactatgatgttcaaatatgtattctgagccattatgttcaaacataaatatctgggaaattcaaactgctgcaacaagttaggaaaggattaaggaaaaatgatgagctacaaattatgtagttggaggaagaaaaaaatgttacttagcatttatgtctggataggtatgtattttctaatttacatacacatatccagntgagtatagacaaccatcaaaatgtaaccagttacacagagactagactaagccaacactattttctataacaggnaacagtagngatttcaaaaattttaatatctcaatagtttcaccaaaaattatttatgggaat

SEQ ID NO: 723 - DNA, 268 bp, Homo sapiens
  misc_feature 67, 124, 156, 208, 241, 261: n = A,T,C or G
ctgagaagagcgccaggaagccctgggtgcgagagttgatgacgtcgatctcgtgcagggacacggngtgcaccacctccttgcgtttctggagctccccatctgggcactgcacgaacttggnctgggagcccatagcgtcgtagtcgcgggcgngtgtgaaggagcggcccaacttggagatcttgcccgtcgccttgtcgatggngatcacgtccccggcctggaccttgtccttggncagggactcaatcatcttgntgcccag

SEQ ID NO: 724 - DNA, 344 bp, Homo sapiens
  misc_feature 63, 191, 201: n = A,T,C or G
aaagaatcagcaaaatttcaaataaaaaattatgaaaatattatcctcattagttcatttagncccatgaaattaattattttctctgctcgatcttggtggacagtttcatgaagctgtcagttagttcattaaagttttggaaattctcagacagtgcagtggtatcagaaacttgtattcaagagtanaggtcagagncttcttttcttttctttttgagatggagtcttgctctgttgccagactggagtgcagtggtgcgatctgggctcactgcaatctccacctcccgggttcaagcgattctcctgcctcagcctcccgagtaactgggactacag

SEQ ID NO: 725 - DNA, 345 bp, Homo sapiens
  misc_feature 32, 90, 179, 223, 306, 339, 340: n = A,T,C or G
aaacaagagaaagtagacagatacatgttggnaaatgctaactgtccatattcacatagagacacagtgtactctctgagcccaatatanagagaaaggaggaaaaaagctagaattctatgcactactacacaggggcctagcaccctccagcttccagcagagcgaagggagcaggnttttcttttttcccacagagctcggggggttgattccatacagnttttgttcagacaggaagggataaaaatgaacttcgaacagaaaggggtagagactcttttcccattgtattctgctcaaggnatttccccccaaataaattgagaaccatggagnngagaa

SEQ ID NO: 726 - DNA, 305 bp, Homo sapiens
  misc_feature 112, 118, 187, 284: n = A,T,C or G
ttgcctgatgtcagagcccctccacacatgagcctgctccctactgccaacaccgtggcccagacagagacgctttccgaggaagaggtgaagctcctgcagtcgctgaagnaagganagcagatcgtgaggaaaaagggcgccgaggttgggggcatgtctctcttcttaccaagctagactgggntgccttttctaactattccagccctacagggcgaggggccataatggagtatcccgcccctttagaccccaggcgctcaccggcagggcaagaaggngaaatccagcagccgcgccag

SEQ ID NO: 727 - DNA, 387 bp, Homo sapiens
  misc_feature 131, 151: n = A,T,C or G
ccaacgaggcatcacctctgacggtgtcagtcatcgatgaccggctcaaggagaagatggtggtggagttccgccacatgaggaaccatgcctatgagccactcgccagcttcctagacttcattacttanagttacatgatcgacaacgngatcctgctcatcacaggcacgctgcaccagcgctccatcgctgagctcgtgcccaagtgccacccactaggcagcttcgagcagatggaggccgtgaacattgctcagacacctgctgagctctacaatgccattctggtggacacgcctcttgcggcttttttccaggactgcatttcagagcaggaccttaacgagatgaacatcgagatcatccgcaacaccctctacaagg

SEQ ID NO: 728 - DNA, 109 bp, Homo sapiens
ctgactgacagccagattgcagatgtggctcgcttttgtaaccgctaccctaatatcgaactatcttatgaggtggtagataaggacagcatccgcagtggcgggccag

SEQ ID NO: 729 - DNA, 329 bp, Homo sapiens
  misc_feature 247, 281, 304: n = A,T,C or G
aaagcataggactatagtcagcatgctagactgagaggtaaacactgatgcaattagaacaggtactgatgctgtcagtgtttaacactatgtttagctgtgtttatgctataaaagtgcaatattagacactagctagtactgctgcctcatgtaactccaaagaaaacaggatttcattaagtgcattgaatgtggctatttctctaagttactcatattgtcctttgcttgaatgcaatgccgngcagatttatgtggctgctatttttattttctgngcattactttaacaccttaaagngagaagcaaacatttccttcttcag

SEQ ID NO: 730 - DNA, 238 bp, Homo sapiens
  misc_feature 67, 204: n = A,T,C or G
aaaaagtggcagagtgacttaactgatcatgcatgatccctcatccctgaaattgagtttatgtagncattttacttattttattcattagctaactttgtctatgtatatttctagatattgattagtgtaatcgattataaaggatatttatcaaatccagggattgcattttgaaattataattattttctttgctgaagnattcattgtaaaacatacaaaataaacatatttt

SEQ ID NO: 731 - DNA, 297 bp, Homo sapiens
  misc_feature 202, 254: n = A,T,C or G
aaactgaattttttgaccttggaaaatatttttcttactttaccaaggtgaagtttccttaattagactaattattttatccccatcccagggtataaacaggaattgttttgatagtggtggagttattcactgcaacaaagcaacaatgttgtccatgattcaaaatctaagcagtttcgattttgcctgtgaatatggngtctgtcattcagggcatagctcactgtaggctagcctctgcttacttaagnctcttctctgacatactcaatggaagaatatttagatttattt

SEQ ID NO: 732 - DNA, 370 bp, Homo sapiens
  misc_feature 88, 104, 131, 184: n = A,T,C or G
ctgtcagtcttcctgaaatgaagaaactacaccagggctgctatatcagagcaaccccaaccagcactccaatcatgatgccgacagnggccccaattagaagntcaaaaacaaaaattaagttaggtagncagacatctataaatactagtatccgcatgaatgaaaacaccctggctttggnatggctacagaaatccatctggaaattattcaaaaggacgtggttcagggaaaagggggtaggcagggcatggggggaggggaacacacaaaacccccaagcagaggtaaaatgaatattggaacacacccgcagcaaacactgtacatagacttgaggcagatgcctctaacacaacacatatac

SEQ ID NO: 733 - DNA, 242 bp, Homo sapiens
  misc_feature 129: n = A,T,C or G
cctcctatttattctagccacctctagcctagccgtttactcaatcctctgatcagggtgagcatcaaactcaaactacgccctgatcggcgcactgcgagcagtagcccaagcaatctcatatgaagncaccctagccatcattctactatcaacattactaataagtggctcctttaacctctccacccttatcacaacacaagaacacctctgattactcctgccatcatgacccttgg

SEQ ID NO: 734 - DNA, 368 bp, Homo sapiens
  misc_feature 154, 188, 311: n = A,T,C or G
cctttcttgtaagtgaagaaaaaggaatgcagcaaagaagagttcgacattggagtccttagttccatcaggatcccattcgcagcctttagcatcatgtagaagcaaactgcacctatggctgagataggtgcaatgacctacaagattttgngttttctagctgtccaggaaaagccatcttcagncttgctgacagtcaaagagcaagtgaaaccatttccagcctaaactacataaaagcagccgaaccaatgattaaagacctctaaggctccataatcatcattaaatatgcccaaactcattgngactttttattttatatacaggattaaaatcaacattaaatcatcttatttacatgg

SEQ ID NO: 735 - DNA, 308 bp, Homo sapiens
  misc_feature 92, 101, 120, 216, 279: n = A,T,C or G
ctgtccaataggcgtagctatccggacagagcacgtttgcagaagggggactcttcttccaggtagctgaaaggggaagacctgacgtactntggttaggntaggacttgccctcgtggnggaaacttttcttaaaaagttataaccaacttttctattaaaagtgggaattaggagagaaggtaggggttgggaatcagagagaatggctttggnctcttgcttgtgggactagcctggcttgggactaaatgccctgctctgaacacgaagcttagnataaactgatggatatccctaccttgaaa

SEQ ID NO: 736 - DNA, 354 bp, Homo sapiens
  misc_feature 57: n = A,T,C or G
ccttctgctacgtagtctacaacagaaggattcaggcaattacctctgccatgcggnggaacatgggttcatacaaactcttcttaaggtaaccctggaagtcattgacacagagcatttggaagaacttcttcataaagatgatgatggagatggctctaagaccaaagaaatgtccaatagcatgacacctagccagaaggtctggtacagagacttcatgcagctcatcaaccaccccaatctcaacacgatggatgagttctgtgaacaagtttggaaaagggaccgaaaacaacgtcggcaaaggccaggacataccccagggaacagtaacaaatggaagcacttaca

SEQ ID NO: 737 - DNA, 198 bp, Homo sapiens
  misc_feature 59, 184: n = A,T,C or G
ctgccgctgcacacgctcgttcttctctgcctcagtgatgcgcttctcctcattgcggncatcccggatgccctcactagacagctccgcgctgtagcccgtgggctctgcgccctcatcctgcaagctctcctggacatggtagctcaccggctcgtacacggggggtggtgggggcgggggngctgtcatcaccag

SEQ ID NO: 738 - DNA, 228 bp, Homo sapiens
  misc_feature 36, 93, 202, 221: n = A,T,C or G
gtgccatggcacacagcctgggtgcacacccagcgncctctcttgcaggtgcaggtattgcagtccaccttgatcttggcgccggaagaatanaggtcgttgttatggacgcaagggcattccttctccaccacgcagccaccccggccgtcatccatcagcccgtcggggcacacacagccactgacacactctgtgtggnaatagccggcggccagcgnctggcag

SEQ ID NO: 739 - DNA, 378 bp, Homo sapiens
  misc_feature 124, 136, 169, 200, 230, 233, 247, 332, 339: n = A,T,C or G
aaaaaatacaggagtcgatagcagcagttggtgacgagatggcactcagaaacggcgttgacgtaatttaggacgtggaatcataagcgaaacagcacactgtttgaataaagagcgagtcggnatttatatttgnttttcttttgtcatgattatttgatttttaagntgctccagctaaggcatttttttgtattagnatttctattagggaacctttcttattaggnggnttgtattgtctggnttctaacatgcaggtagctgtttggcagttaaacacgtttagagtaatttgagttacaacgtgtgaaactgagcaaaaaagcagngataagnttgggttaccataccaaatatttgttttcccactggaaa

SEQ ID NO: 740 - DNA, 200 bp, Homo sapiens
  misc_feature 13, 95: n = A,T,C or G
ccacttgagtggntcctggctgcttctgtgattgttaggtcttgagagattatggacccgaggcattctgggtaccccatcaattggctgatggncttctatttgggctgcgcttcttctaaaaaggggagctcaaaggtctttttttcccccactgcagagctaaaaaagtccctgtacgccatcttctcccagtttgg

SEQ ID NO: 741 - DNA, 273 bp, Homo sapiens
ctgcttggcatcgtaatgggccggtggcatcatgagccccagaatcagccttgccaggtctccagagatctcagacttcaggtcagtcattaagtcccggccaaagtgagacttgaaggtctgccggatctgctgccgctggacattgctgcggtgcgtgatgatatcgatgattgtgtcttcgtcagtcccgagtcccttcatggctttccgcagcgctttggcatctgcgtcagggttgaagtcattggctgggcgcacaggtcccttcag

SEQ ID NO: 742 - DNA, 297 bp, Homo sapiens
  misc_feature 89, 188, 264, 266: n = A,T,C or G
ctgcagttgctccctttagggttataaaataatgacccaaatgttacatgtgttgatattataacttgtcagttactgatgtctgtggnatcctaccctcatctctgaaagggataatactgaataattattagaaaactataaaacttcacactttgtaccattaaaacctaaaattttaatcttgnccttttttactatggatcagtcggcactcgggaacagcagcaaggaaaagaggcaaatttcattcacatgttctgngntcatacctcttctctacctaattgttcattt

SEQ ID NO: 743 - DNA, 381 bp, Homo sapiens
  misc_feature 240, 243, 252, 291, 305, 321, 324, 327, 342: n = A,T,C or G
ctgcacctccacctccttgaagttgaagatactattgccatcaaagccagcagccagctctggacagtatgcctgcagggaacctccatgccggctcagtgacacactctctgcagccagggtaatgaacttgtcctcagctacaaaagctgtgagcttggctgtgctcacctccagggttaggtttagcagccgctttgggggtaatggctcaggggcacggccttctagctcagaagnagntcctgaagnctctagtgcaagggatggtacagtctcaggaaacacagnggctcttagtaggnctcggcactgtagagnggnggnatccccagagctggngatgatttggttgtcatccaggaagcggcaacacgacag

SEQ ID NO: 744 - DNA, 167 bp, Homo sapiens
  misc_feature 6, 78: n = A,T,C or G
cagcgnggggctcggagaggtgctcggattctcgtagctgtgccgggacttaaccaccaccatgtcgagcaaaagaanaaagaccaagaccaagaagcgccctcagcgtgcaacatccaatgtgtttgctatgtttgaccagtcacagattcaggagttcaaagagg

SEQ ID NO: 745 - DNA, 96 bp, Homo sapiens
ccacaaactcctctggctgtactccctcctgcaggagaccggcctcactgcactcagcaggctcttctccctgcgattcacttctgggacagtcac

SEQ ID NO: 746 - DNA, 391 bp, Homo sapiens
  misc_feature 257: n = A,T,C or G
ccattacgcagccgcttcagcaaacagggctcctcccggcccgagggcgggaccacagtggccgtcagcaggctgagatccgtctctgagatgttgatggggatgtcggcagcagagccgacctttaggtgggacatacgcatggagtcgtcacctgtgacccgggcagtgaaggggctgcctgggacgtgctgttcattgtacttgactagaatgctgtagtcccccggcagcacaggcaagtaggacacgctgcnatgtcccatcctggttgtcagtgcagtgttgcttgttcagtatctcaagcccagaaagatgaattaatccttgaaggaaatgacattgagcttgtttcaaattcagcggctttgattcagcaagccacaacagt

SEQ ID NO: 747 - DNA, 408 bp, Homo sapiens
  misc_feature 71, 233, 367: n = A,T,C or G
aaagttgtttgtgcctttttatttttgtttttaatgctttgatatttcaatgttagcctcaatttctgaanaccataggtagaatgtaaagcttgtctgatcgttcaaagcatgaaatggatacttatatggaaattctgctcagatagaatgacagtccgtcaaaacagattgcttgcaaaggggaggcatcagtgtccttggcaggctgatttctaggtaggaaatgtggnagcctcacttttaatgaacaaatggcctttattaaaaactgagtgactctatatagctgatcagttttttcacctggaagcatttgtttctactttgatatgactgtttttcggacagtttatttgttgagagngtgaccaaaagttacatgtttgcacctttctaggtgaaaat

SEQ ID NO: 748 - DNA, 337 bp, Homo sapiens
  misc_feature 34, 63, 224, 302: n = A,T,C or G
ggcggagagaggcgagcaccgggaaggggagcgnggggccgctggaatgggtgaatttaaggnccatcgagtacgtttctttaattatgttccatcaggaatccgctgtgtggcttacaataaccagtcaaacagattggctgtttcacgaacagatggcactgtggaaatttataacttgtcagcaaactactttcaggagaaatttttcccaggtcatgagnctcgggctacagaagctttgtgctgggcagaaggacagcgactctttagtgctgggctcaatggcgagattatggagnatgatttacaggcgttaaacatcaagtatgctatg

SEQ ID NO: 749 - DNA, 261 bp, Homo sapiens
  misc_feature 112, 151, 163, 226, 253: n = A,T,C or G
ccgggaggctctgattatttacccaccacaggtaggttgtgttctgaatctcaggttcacaggttaaggctacagcatcctcatcctccacggggttggagttgttgctggngatgaagggtttgggtggctctgcatagactgtgatcgncgtgactgtggncctattgaggccagtgtctgagttatgggcttggcacgtataggatccactattattcacagngatgttggggataaagagctcttgggnggattgct

SEQ ID NO: 750 - DNA, 150 bp, Homo sapiens
  misc_feature 9, 56, 57, 146, 148, 149: n = A,T,C or G
aacgctgangacatgacatccaaagattactactttgactcctacgcacactttgnnatccacgaggagatgctgaaggacgaggtgcgcaccctcacttaccgcaactccatgtttcataaccggcacctcttcaaggacaaggngnng

SEQ ID NO: 751 - DNA, 288 bp, Homo sapiens
  misc_feature 131, 276: n = A,T,C or G
aaaacttttgttaagaaaaactgccagtttgtgcttttgaaatgtctgttttgacatcatagtctagtaaaattttgacagtgcatatgtactgttactaaaagctttatatgaaattattaatgtgaagnttttcatttataattcaaggaaggatttcctgaaaacatttcaagggatttatgtctacatatttgtgtgtgtgtgtgtgtatatatatgtaatatgcatacacagatgcatatgtgtatatataatgaaatttatgttgctggnattttgcatttt

SEQ ID NO: 752 - DNA, 248 bp, Homo sapiens
  misc_feature 188: n = A,T,C or G
ctggcactgaggattatatccatataagaattcaacagagaaacggcaggaagacccttactactgtccaagggatcgctgatgattacgataaaaagaaactagtgaaggcgtttaagaaaaagtttgcctgcaatggtactgtaattgagcatccggaatatggagaagtaattcagctacagggngaccaacgcaagaacatatgccagttcctcgtagagattggactggctaaggacgatcag

SEQ ID NO: 753 - DNA, 346 bp, Homo sapiens
  misc_feature 137, 313: n = A,T,C or G
ctgctagaaaacagggaagatattagccaatatggaattgccaggttcttcactgaatattttaacagtgtatgccagggaacacacattctctttcgagaattcagcttcgtccaagccaccccccacaatagggnatcatttttacgggccttctggagatgcttccgaactgtgggcaaaaatggcgatttgctgaccatgaaagaatatcactgtttgctgcaattactgtgtcctgatttcccgctggagctcactcagaaagcagccaggattgtgctcatggacgatgccatggactgcttgatgnctttttcagatttcctctttgccttccagatcc

SEQ ID NO: 754 - DNA, 100 bp, Homo sapiens
  misc_feature 22, 71: n = A,T,C or G
gtgccacaggcagccctggganataggaagctgggagcaaggaaagggtcttagtcactgcctcccgaagntgcttgaaagcactcggagaattgtgcag

SEQ ID NO: 755 - DNA, 405 bp, Homo sapiens
  misc_feature 214, 305, 366, 368, 378: n = A,T,C or G
tgtgggcccacttcccaaatctctggaggatctgcagcttactcataacaagatcacaaagctgggctcttttgaaggattggtaaacctgaccttcatccatctccagcacaatcggctgaaagaggatgctgtttcagctgcttttaaaggtcttaaatcactcgaataccttgacttgagcttcaatcagatagccagactgccttctggnctccctgtctctcttctaactctctacttagacaacaataagatcagcaacatccctgatgagtatttcaagcgttttaatgcattgcagnatctgcgtttatctcacaacgaactggctgatagtggaatacctggaaattctttcaatgngncatccctggntgagctggatctgtcctataacaagct

SEQ ID NO: 756 - DNA, 306 bp, Homo sapiens
  misc_feature 112, 157, 186, 271: n = A,T,C or G
ccttgggaaattacctggaaatgcgactgaaatcttccttcctgaggggtctgggctcttggaaatcaaaccctctcaggttgggtggctggacgattctcctcacacttanaatgggacaaggggaaccaggaggcccccaaggggatccctgggntccacacgaactcctcctaccctcattgngtgacagcagccatgcctcctcctggggatcaggatctattacctgtgcctggagaggaggggactcctcttctcacccgctggnctctggacacatactgtccaattcccctgtggcag

SEQ ID NO: 757 - DNA, 321 bp, Homo sapiens
  misc_feature 12, 46, 65, 79, 92, 127, 180, 186, 204, 208, 235, 275: n = A,T,C or G
ctggagggaggntccctgggaggtttttgtggattccttctgcagngactcccctggtttctggntctggggacccagngtccaggcgcagncttttagcacttctcagtgtagacgttgacagggntcttttcccgcttgaatcctgctgagtccccaaatctcttgacttgtcttggntacagncaccaccagagctgctcncagntttgacaaaagcagttgctgctgaagngatcgttttgaatcctatcatagcactggcaggtcccggnaaattcttacagtcagcaggcggacctcgtgtgagttgaatattcc

SEQ ID NO: 758 - DNA, 278 bp, Homo sapiens
  misc_feature 12, 54, 111, 149, 220, 226, 273: n = A,T,C or G
cgctcggcaagntctcccaggagaaagccatgttcagttcgagcgccaagatcntgaagcccaatggcgagaagccggacgagttcgagtccggcatctcccaggctcttntggagctggagatgaactcggacctcaaggctcagctnagggagctgaatattacggcagctaaggaaattgaagttggtggtggtcggaaagctatcataatctttgntcccgntcctcaaacctgcccgggcggccgcttcgagccctatagtgaggcgnattag

SEQ ID NO: 759 - DNA, 401 bp, Homo sapiens
  misc_feature 268, 301, 318, 321, 333, 367: n = A,T,C or G
gcaaactgcaaaccatggtgagaaattgacgacttcacactatggacagcttttcccaagatgtcaaaacaagactcctcatcatgataaggctcttacccccttttaatttgtccttgcttatgcctgcctctttcgcttggcaggatgatgctgtcattagtatttcacaagaagtagcttcagagggtaacttaacagagtatcagatctatcttgtcaatcccaacgttttacataaaataagagatcctttagtgcacccagngactgacattagcagcatctttaacacagccgngtgttcaaatgtacagnggnccttttcagagntggacttctagactcacctgttctcactccctgntttaattcaacccagccatgcaatgccaaataat

SEQ ID NO: 760 - DNA, 346 bp, Homo sapiens
  misc_feature 278, 335: n = A,T,C or G
ccgaggtttggatcatgggagaacagcagaaaggggttattgagggaacctacactgttctagctgcaccccatgcccttctcagaggaaagcctggcattgattagatactgggccagactaatactggcagcagagccagtgatagtaacctgcctaccagaggagccttccactgggttggcaattttgatctgggccccggacatctggcggatctcattaatgttggcgccttggcgcccgattatgcagccaattaagttatttggaatggngagttcatgggtggtttgagtagatgcatccaaacttgcccaatagcctttcacctntggagagacct

SEQ ID NO: 761 - DNA, 256 bp, Homo sapiens
  misc_feature 159, 185, 196: n = A,T,C or G
gagacagactgggtgatgacgctgaatctgcagaggtgctggtgaccaattcccctaaagcatctacttgtctcctcaaactgtgtaaagtgccctctgtctgccgctttcctttaattaatacttctgcttgcttggacatacagtgtcggagttggncctgaaaagtgtgataagacttaggnttttacacagnaagaaatgtaccagaactgctgctcagcttcctcacatacatttgataggcaaatctagc

SEQ ID NO: 762 - DNA, 321 bp, Homo sapiens
  misc_feature 12, 39, 162: n = A,T,C or G
tggactctggantgatgctggaagtagatacgaaaatgngaagaacaatggaacagcacactttctggagcatatggctttcaagggcaccaagaagagatcccagttagatctggaacttgagattgaaaatatgggtgctcatctcaatgcctatacctncagagagcagactgtatactatgccaaagcattctctaaagacttgccaagagctgtagaaattcttgctgatataatacaaaacagcacattgggagaagcagagattgaacgtgagcgtggagtaatccttagagagatgcaggaagttgaaaccaa

SEQ ID NO: 763 - DNA, 348 bp, Homo sapiens
  misc_feature 52, 66, 114, 127, 144, 152, 177, 200, 214, 261, 331: n = A,T,C or G
tgagaaaacataaagtaaccagcagatttcaatattaaaaagaagtggttcntcctaaaaaaggtnttagatcatagagttgggattagggtaggggatacctattaatctggnctggaaaaaaagngtgtggagaaggggagntgtattgntttctcacaagaggcaaacttcagncaaacaatgaagagatagtaggnagggagatgtgtgntagaccaaagactttctgattgctgataataacaaatttagcagctntctacaagtcaattaaaataccattctctgagacattttcagagaggagctaactaacacccacccaggnggaaaaatcattctaca

SEQ ID NO: 764 - DNA, 374 bp, Homo sapiens
  misc_feature 4, 59, 111, 129, 132, 198, 204, 242, 288, 327: n = A,T,C or G
agcnaagaaggaagctcctgcccctcctaaagctgaagccaaagcgaaggctttaaagnccaagaaggcagcgttgaaaggtgtccacagccacaaaaagaagaagatccncacgtcacccaccttccngcngccgaagacactgcgactccggagacagcccaaatatcctcggaagagcgctcccaggagaaacangcttgnccactatgctatcatcaagtttccgctgaccactgagnctgccatgaagaagatagaagacaacaacacacttgtgttcattgnggatgttaaagccaacaagcaccagattaaacaggctgngaagaagctgtatgacattgatgtggccaaggtcaacaccctgattc

SEQ ID NO: 765 - DNA, 288 bp, Homo sapiens
  misc_feature 181: n = A,T,C or G
aaatacaataattctgttattgataaaatttaaggcattttcattgccttttgcagatttactcataactacctaacaaggaaagaaggtataattatttcagattggattatttattctaaaattaaattcttcactaatttattctaagatgaatttaatagtccatcaggaaattggnttttataaagcttattttatgggcataaaatacaggaaaaggtaataataaatgccaaaccgtctctttactttatgaagccaaatatttcctcagacttggttttt

SEQ ID NO: 766 - DNA, 424 bp, Homo sapiens
  misc_feature 337: n = A,T,C or G
ttgtggttgtgcctgagggctctgcttccgacactcatgaacaggctatcttgcggttgcaagtcaccaatgttctgtctcagcctctgactcaggccactgttaaactagaacatgctaaatctgttgcttccagagccactgtcctccagaagacatccttcacccctgtaggggatgtttttgaactaaatttcatgaacgtcaaattttccagtggttattatgacttccttgtcgaagttgaaggtgacaaccggtatattgcaaataccgtagagctcagagtcaagatctccactgaagttggcatcacaaatgttgatctttccaccgnggataaggatcagagcattgcacccaaaactacccgggtgacatacgcagccaaagccaagggcacattcatcgcagacagccacca

SEQ ID NO: 767 - DNA, 302 bp, Homo sapiens
  misc_feature 203: n = A,T,C or G
ggctttctcaataagcctcagctttctaagatctaacaagatagccaccgagatccttatcgaaactcattttaggcaaatatgagttttattgtccgtttacttgtttcagagtttgtattgtgattatcaattaccacaccatctcccatgaagaaagggaacggtgaagtactaagcgctagaggaagcagccaagtcgnttagtggaagcatgattggtgcccagttagcctctgcaggatgtggaaacctccttccaggggaggttcagtgaattgtgtaggagaggttgtctgtgg

SEQ ID NO: 768 - DNA, 94 bp, Homo sapiens
  misc_feature 62, 63, 73, 86: n = A,T,C or G
ctgatctaaaagaagttactgaggaagatttgaataatcactttaagtctttgggaagcagnnatttgaaatnttgaggtgacagncttttaag

SEQ ID NO: 769 - DNA, 69 bp, Homo sapiens
  misc_feature 36, 40, 53: n = A,T,C or G
ctgcaagacgactccaacccaacaacaaccagatgngctncagcccagccggncttcagttccatattt

SEQ ID NO: 770 - DNA, 222 bp, Homo sapiens
ctgaacgcaaaccagccactttaattaagctaagcccttactagaccaatgggacttaaacccacaaacacttagttaacagctaagcaccctaatcaactggcttcaatctacttctcccgccgccgggaaaaaaggcgggagaagccccggcaggtttgaagctgcttcttcgaatttgcaattcaatatgaaaatcacctcggagctggtaaaaagagg

SEQ ID NO: 771 - DNA, 332 bp, Homo sapiens
  misc_feature 262: n = A,T,C or G
ctgctttccctcctatggctcccctggaacaggagggagagccaagggggcggcccagcctggacagcgcccgctcctgcctgggtgcacacacggcgggcctgagctccagcatctgagtttgggggtatgagaaacaggggagcagaaggagaagaaaactgcctgtgctgcaacacgtttcctcatttattttttctttctttttctttttttctttttttggagggagaggtccctgcaaggtcccttcccgggcagnggagggatggaaatgccgtcacagtagtagggactggagcgtctacaaggatggaggggagctactcagg

SEQ ID NO: 772 - DNA, 194 bp, Homo sapiens
aaaagaaagatcaattatatccatgcttaacaggatcagcaggagctttataaatgactttacagagactaataagggatttgatctttctttttttgttatcgaggcttttgaaatgtggaacttgtgtgttctgctttatatgttatattcaatatcttttcagatgcagtctatattttatgctgagtttt

SEQ ID NO: 773 - DNA, 272 bp, Homo sapiens
ccaattgatttgatggtaagggagggatcgttgacctcgtctgttatgtaaaggatgcgtagggatgggagggcgatgaggactaggatgatggcgggcaggatagttcagacggtttctatttcctgagcgtctgagatgttagtattagttagttttgttgtgagtgttaggaaaagggcatacaggactaggaagcagataaggaaaatgattatgagggcgtgatcatgaaaggtgataagctcttctatgataggggaagtagcgtc

SEQ ID NO: 774 - DNA, 314 bp, Homo sapiens
  misc_feature 18, 42, 45, 94, 95, 114, 117, 125, 143, 154, 198, 207, 222,245, 258, 287: n = A,T,C or G
gtgtcttgtacagttagntatattagcagccctctgagatgncgnatctatcggaaggatttcaaacaccaattgctttacctgaacaaatggnncttaccctttgaacagcanagngaccacgnagaaggaaggaaaagggnaaaatcgcttnagttaaactgaaattaaatgaacaataaggcaactatataagtnacttctagnagcattgcctgaganacaaattattgtttgataatttncattgtgaatagnaatccaatagatcatattgcttactttgntctttttatactatagaataatatttt

SEQ ID NO: 775 - DNA, 207 bp, Homo sapiens
cctgacagagctcagctcacactgggaagtgtggatgcagggtgcccttccctaccccagtgagaaggaagattccttacccatcttgcttcccccccagggaagatcatcatgcacgacccatttgccatgcggcccttttttggctacaacttcgggcactacctggaacactggctgagcatggaagggcgcaagggggcccag

SEQ ID NO: 776 - DNA, 196 bp, Homo sapiens
  misc_feature 37, 65, 100, 128, 139, 140: n = A,T,C or G
gtgaacggaggcactgtggccgagaagctggactggncccgcgagaggcttgagcagcaggtacntgtgaaccaagtgtttgggcaggatgagatgatcnacgtcatcggggtgaccaagggcaaagnctacaaagggnncaccagtcgttggcacaccaagaagctgccccgcaagacccaccgaggacctcggc

SEQ ID NO: 777 - DNA, 325 bp, Homo sapiens
  misc_feature 55, 218, 239: n = A,T,C or G
aaagttgaactaagattctatcttggacaaccagctatcaccaggctcggtaggnttgtcgcctctacctataaatcttcccactattttgctacatagacgggtgtgctcttttagctgttcttaggtagctcgtctggtttcgggggtcttagctttggctctccttgcaaagttatttctagttaattcattatgcagaaggtataggggttagnccttgctatattatgcttggntataatttttcatctttcccttgcggtactatatctattgcgccaggtttcaatttctatcgcctatactttatttgggtaaatgg

SEQ ID NO: 778 - DNA, 421 bp, Homo sapiens
  misc_feature 147, 191, 228, 231, 233, 280, 366, 384: n = A,T,C or G
ccaaaagaagtaagacagcttgctgaagatttcctgaaagactatattcatataaacattggtgcacttgaactgagtgcaaaccacaacattcttcagattgtggatgtgtgtcatgacgtagaaaaggatgaaaaacttattcgnctaatggaagagatcatgagtgagaaggagaataaaaccattgnttttgtggaaaccaaaagaagatgtgatgagcttacncananaaatgaggagagatgggtggcctgccatgggtatccatggtgacaanagtcaacaagagcgtgactgggttctaaatgaattcaaacatggaaaagctcctattctgattgctacagatgtggcctccagagngctagatgtggaagatgngaaatttgtcatcaattatgactaccctaactcctca

SEQ ID NO: 779 - DNA, 330 bp, Homo sapiens
ctgaactttccgcttacgctgcccagagctgccaggtgtagactgagaattcgagttttgtttcttccttggggttgtatctgcagccttttctccctgggactccctgtctgctgccaatggagttgaagaactggaatgatgacacagctcctcttctcttattttctttgctggcctctccggtgtctgggagcgggaggaggcttgggctagagaagggtgatgaactggggccatttctcttccagagctgtgagatgcctcgagtggagctgtaggaactggtaatggcattgcggctggagctagggatgccacttgcgtaag

SEQ ID NO: 780 - DNA, 279 bp, Homo sapiens
gagaggtagagtttttttcgtgatagtggttcactggataagtggcgttggcttgccatgattgtgaggggtaggagtcaggtagttagtattaggaggggggttgttagggggtcggaggaaaaggttggggaacagctaaataggttgttgttgatttggttaaaaaatagtagagggatgatgctaataattaggctgtgggtggttgtgttgattcaaattatgtgttttttggaaagtcatgtcagtggtagtaatataattgttgggacgatt

SEQ ID NO: 781 - DNA, 323 bp, Homo sapiens
ttgatcttctgcaggaaggtgcagcttttccatatcagctcaaccacgccgccagtccattcttaaggaactgccgactaggactgatgatgcattttagctttgagcttttgggggttattctaccaacaaacagtccattggaaagaaaacagtccctggaattaacagattagaatgttcacactggttaatctttttttaacaatgagcatgaaggtagcagaagctggtgtgtttccagatggttcttctaaccaaactaatttttcactgttgacaagcgaggcaagggttgcactggaccaaaggctgaggcttgg

SEQ ID NO: 782 - DNA, 264 bp, Homo sapiens
  misc_feature 47, 69, 195, 262: n = A,T,C or G
ttctagctttgccctcactccccggaaaaactgacactgacacaggngctctttccttgcccctttagntggtacctcagtggggaggcttccttaccaagaatgagttcctgaaacccagggccagagacaaggacaacttaggggaagacggggttttcggtggagccaggggcaaatcttaatgggaccagngggggataccccagagcccatggcctgactgcacagcctgcctggaggatgggtgcgcagttctgcnct

SEQ ID NO: 783 - DNA, 159 bp, Homo sapiens
ctgtgtgaaggcgacagtggtgcaggtcttcctgtggactagacgtcccagtcttgcctttcccttgataatgcagtaagggacccccattttacgacacagggcaggcaagaagacaaccagctcgatgggatccacgtcgtgtgcaatcaccaccag

SEQ ID NO: 784 - DNA, 128 bp, Homo sapiens
ctcggccctcttacaccattttgtttgattgtctagtccctgtttctttttctttctaatccttattcatttaagcaaaaccatacattatcttttccagtcctttcttgtattcttactgttttttt

SEQ ID NO: 785 - DNA, 346 bp, Homo sapiens
  misc_feature 142, 323, 325, 330: n = A,T,C or G
ctgggctgatgctggaactcgtagaagtacacaggggcccgggaacactgaaaatgtgctacttggagtgcagggatcacaaacatggagtccgccatcatctcctggaactgcgcttggagggtctggggatccccattgnccccaatgtactcctccctcagcaggtcaccaaatgtaggaggcaacatcagcagcgttaacattttctgcagagcagcctgggaggcctctctgtccatttccttctgggtatcatagatcctcatgaccttggggatgagccagccgaattcattgttgttgacaccaacaatgctagngnacagnctgaaagtcggcagag

SEQ ID NO: 786 - DNA, 118 bp, Homo sapiens
ctgcactgatctgtggggagagttttacagacttttcattccagcctcctccattgacagtgaggtcttcattcaatcctgaagaaacctgaagtgtagaatctccttttccagattt

SEQ ID NO: 787 - DNA, 257 bp, Homo sapiens
cactcattcatcgacctccccaccccatccaacatctccgcatgatgaaacttcggctcactccttggcgcctgcctgatcctccaaatcaccacaggactattcctagccatgcactactcaccagacgcctcaaccgccttttcatcaatcgcccacatcactcgagacgtaaattatggctgaatcatccgctaccttcacgccaatggcgcctcaatattctttatctgcctcttcctacacatcgggcgagg

SEQ ID NO: 788 - DNA, 155 bp, Homo sapiens
  misc_feature 15, 22, 34, 38, 45, 69, 73, 127: n = A,T,C or G
cgcaagagcctatgnatgtggnatccagaactcngtgngcgcaanccgcagagacccagtcaccctggntgtnctctatgggccggacacccccatcatttcccccccagactcgtcttacctttcnggagcgaacctcaacctctcctgccact

SEQ ID NO: 789 - DNA, 382 bp, Homo sapiens
  misc_feature 203, 225: n = A,T,C or G
cctaagtaaatgaagagctgtaccatattcatgtattggaagacaacattgtaaagatgacatggtttaccagattaatctataaattcaatacaaatccaatcaaaatttcaatgctcttgggtttgtttgatttataaattgttggtctaattctagaagtaatatggaggaacagttggctaagaatagccaagacactncaaggaagaacaattttgtggngatactggagacagaggtgaaattggttacaattatgacaaaatgtggaggcatcttggtttttatcagaccttttcctaaagttgcaataatcaggactgtactgtactgctacaagattagacaaattgatgtcagtcagaatagaaatcatcaa

SEQ ID NO: 790 - DNA, 273 bp, Homo sapiens
  misc_feature 61, 96, 108, 129, 130, 184, 216: n = A,T,C or G
ggatccgctacacagtttctgccagtccctgagttgatgccttttcggctaactcgccagnttatcaatctgatgttaccaatgaaagaaacggtncttatgtacagnatcatggtacacgcactccgnnccttccgctcagaccctggcctgctcaccaacaccatggatgtgtttgtcaagnagccctcctttgattggaaaaattttgaacanaaaatgctgaaaaaaggagggtcatggattcaagaaataaatgttgctgaaaaaaat

SEQ ID NO: 791 - DNA, 344 bp, Homo sapiens
  misc_feature 100: n = A,T,C or G
aaagaatcagcaaaatttcaaataaaaaattatgaaaatattatcctcattagttcatttagtcccatgaaattaattattttctctgcttgatcttggnggacagtttcatgaagctgtcagttagttcattaaagttttggaaattctcagacagtgcagtggtatcagaaacttgtattcaagagtacaggtcagagccttcttttcttttctttttgagatggagtcttgctctgttgccagactggagtgcagtggtgcgatctgggctcactgcaatctccacctcccgggttcaagcgattctcctgcctcagcctcccgagtaactgggactacag

SEQ ID NO: 792 - DNA, 227 bp, Homo sapiens
  misc_feature 97, 215: n = A,T,C or G
gacaaacctgaaattgaagatgttggttctgatgaggaagaagaaaagaaggatggtgacaagaagaagaagaagattaaggaaaagtacatcgatnaagaagagctcaacaaaacaaagcccatctggaccagaaatcccgacgatattactaatgaggagtacggagaattctataagagcttgaccaatgactgggaagatcacttggcagngaagcatttttc

SEQ ID NO: 793 - DNA, 328 bp, Homo sapiens
aaacaagtcatttttcttgatcgttgtggaaggtttggagccttagaggtatgtcagaaaaaatatgttggtattctcccttgggtagggggaaatgacctttttacaagagagtgaaatttaggtcagggaaaagaccaagggccagcattgctacttttgtgtgtgtgtgtgggttttgttttgtttttttggttggccggttgttttcgttgttgttaacaaaggaatgagaatatgtaatacttaaataaacatgaccacgaagaatgctgttctgatttactagagaatgttcccaatttgaatttagggtgattttacctgc

SEQ ID NO: 794 - DNA, 290 bp, Homo sapiens
ccagcgagcacatgaagcggttcttcatgaactttgtggttgggcaggatccgggctcagacgccgccttccacttcaatccgcggtttgacggctgggacaaggtggtcttcaacacgttgcagggcgggaagtggggcagcgaggagaggaagaggagcatgcccttcaaaaagggtgccgcctttgagctggtcttcatagtcctggctgagcactacaaggtggtggtaaatggaaatcccttctatgagtacgggcaccggcttcccctacagatggtcacccac

SEQ ID NO: 795 - DNA, 343 bp, Homo sapiens
aaaatcaaagaaatccttgttttgaaaattggatcttaatctcaaaattgtagaacttggctgagaccattgctttcattttgaaaatgaacttcaactccagaaagaccagtgtgtgctctgccaaataaatttctgagtcacagtctcactaggaatgtgcaaatcaaagcatatgttggtgtaaattcttttgaagtccttgccaagataatcaatggcatttacatttgcttttttctttaataaaaattccaccattttcacttttcttcgactcacagcaagtaacagtggctgatattcattcttgctgcattcttcaatatttgtaccatgtgaa

SEQ ID NO: 796 - DNA, 354 bp, Homo sapiens
tggcgggccgctgaataagcttccaaaatgatgcccacaccagttattctattgaaagaggggactgatagctcccaaggcatcccccagcttgtgagtaacatcagtgcctgccaggtgattgctgaggctgtaagaactaccctgggtccccgtggcatggacaagcttattgtagatggcagaggcaaagcaacaatttctaatgatggggccacaattctgaaacttcttgatgttgtccatcctgcagcaaagactttggtagacattgccaaatcccaagatgctgaggtgggtgatggcaccacctcagtgaccttgctggctgcagagtttctgaagcagacctgc

SEQ ID NO: 797 - DNA, 309 bp, Homo sapiens
ctgtgccgtctgcctgagcccatggatgctttctcaatcctaggctggttactgtgtaagcgttttggagtacggggccttgagcgggtgggagctgtgtgttgaagtacagagggaggttggggtgggtcagagccgagttaagagattttctttgttgctggaccccttcttgaaggtagacgtcccccacccggagagacgtcgcgctgtggcctgaagtggcgcaagcttgctttgtaaatatctgtggtcccgatgtagtgcccagaacgtttgtgcgaggcagctctgcgcccgggttccagc

SEQ ID NO: 798 - DNA, 315 bp, Homo sapiens
ccaccagcattgacgttcttgccatccagaagagctgacagtgtcagtttaatacctggctttagagtctgagtgtatcctaaacctatcaggctggagttgttcactttagccgagaagcaggcgtcagggtcaatctgatacttggctgctattccgaagcgcgtgttactgtttcctgctgtccaggcaagattgacagcggtctccaacttcttgttcactttctggtaaatggagccgccaaactctgtcccgtcattcacattagtgtgaagctggaattcatcagtcttgtagccaactgcaaagttg

SEQ ID NO: 799 - DNA, 157 bp, Homo sapiens
ctgtgatttcctccatagttggcttctgggtcaggccataggcaatattttcttgaagacttcttccaaatacctgtggctcttgtcccactgcagccacctgcctgtgcaggtagcggtgctcatattggggaaggggcttcccatccaacagcag

SEQ ID NO: 800 - DNA, 357 bp, Homo sapiens
aaactcagtgaacccaaacctatttttttcaatctgaatattgctgcagcaaaaccaactccaccaaaaagccgggtaacattaacaaaagaattccctgtatcatctggatctcaacatcggaaaaaagaagcggatagtgtttatggagaatgggttcctgtcgagaaaaatggtgaagaaaacaaagatgatgataatgttttcagcagcaatttgccctcagagcctgtggacatctctacagcaatgagtgaacgggcacttgctcagaaaagactcagtgagaatgcatttgatcttgaagccatgagcatgttaaatagagctcaggaaaggattgatgcctgggctcag

SEQ ID NO: 801 - DNA, 359 bp, Homo sapiens
cctagggggcatatcaagggtttaatagactgggggaatgggcaacagaactggctaccttagaggctctggaatgccccccacccatccacccaccaatggaaggaaagtcaggcatcgcctaaaaggagtggtccctatctagccccaagtctggagcagaaagggcaggtccattctggcccaagtgacattgttagatcctgtcccctcccccaatcactgctgcttgccagggtgcctcttcacagttcccatgtggcagcagtagtggcagaggcagaagtggacttattgtagattgcagtacagatacatggacacaatcatggcagccagctcgaggcccccaattccag

SEQ ID NO: 802 - DNA, 207 bp, Homo sapiens
ccaggctcgggcaccacctcaatcacatccatgatcaagatccgccctcggcacgtgacctcctccccctgcatgaggcaggtcccggcggccacgtagcctttgaggcccgacacggtctcctcactgcgcagagacactgtcttcatgcaggtcacatgctcccactcctgcagctcgatcctggcattgggaatagcctcccag

SEQ ID NO: 803 - DNA, 311 bp, Homo sapiens
  misc_feature 88, 94, 188, 219, 274: n = A,T,C or G
cctatttcactgctgtgtagcctcagtgcctaacatgggtgccaaataaatattcgtagaattacactgaattgtaaaaaccattcgnttttgnttacaattgccaaaaatctcaaaaggccctgtatttatgtaattctttgaaattattattttattttgatttctcagttattgactggctgggngtgacttagtacataagtactcaatattatnaaaacctcaaataattgacttgattttacacaacatccttcccttttctacaagntaatttttttacaaatcatttgggttatctcctaaat

SEQ ID NO: 804 - DNA, 202 bp, Homo sapiens
ctgttcggatttaacttcatcttctggcttgccgggattgctgtccttgccattggactatggctccgattcgactctcagaccaagagcatcttcgagcaagaaactaataataataattccagcttctacacaggagtctatattctgatcggagccggcgccctcatgatgctggtgggcttcctgggctgctgcgggg

SEQ ID NO: 805 - DNA, 238 bp, Homo sapiens
ccaaccagtctggctggagtgatgcattcctggcccagcacacgatgcttaccctggatcccaacgtcaccggtgtcttcctgggaccctacccctttggcatcgatcctatttggagcctggctgccaaccacttgagcttcctcaactccttcaagatgaagatgtccgtcatcctgggcgtcgtgcacatggcctttggggtggtcctcggagtcttcaaccacgtgcactttgg

SEQ ID NO: 806 - DNA, 325 bp, Homo sapiens
  misc_feature 129, 141, 291: n = A,T,C or G
cctgaggtctgcggaaggtgggaggaggcagacgccctgcgtggcccatggtcggggcgtccacgccgaggccggcaacaaacgacagtatctcggattccttttttttttaattttttatactttggngtttcacttcgngctctgaatactgaataaccatgaatgactgaatagtttagtccagatttttacagaggatacatctatttttatcattatttggggtttgaaaaatttttttttacaccttctaatttctttatttctcaaagcagataattcttctgngtgaaaatgttttctttttttaatttaaggttta

SEQ ID NO: 807 - DNA, 289 bp, Homo sapiens
cctaaagggaactgtcttctgtcgagaagtaaaggaaacttcatgaaggatgtagaagcttagctgcctcagagaagagagaacctgaagatctgaggcaagctggacaggagaggtagatatttgttgatggaagaattcaagtttataatcaattcccacttagcacctactgtgtgctaggaacttgaatgtgtatgtttgacaagtcctgcttggcctgatgggtgggagaaggaacctgagcctggctgagatggctaggcggagggctttgaagtccaagcag

SEQ ID NO: 808 - DNA, 376 bp, Homo sapiens
aaacttaattaaagagcttgacaagctctgcatattcatgtgtcataagcagtatgtgacaaaaaaaactgtgcagtatgtaccccctcacgaaatttagtttggcagggaaaacaagatgcacatgttattataaattagaaaatggaagagaagtagaaataaatccatgagtattatatataagtaacagaacaaaaacaacaggataatgtatcccccccaaaggcccagtagagaccatcaaagctcattctgggggtagtcaaggagggagtggagggagaaaaagaacgcagaccttcaaccactaatgaaagaactgaaacatctgtatgtagaaaaaaggtaaaatcaactcactatcatcttcagc

SEQ ID NO: 809 - DNA, 243 bp, Homo sapiens
  misc_feature 19, 162, 174, 175, 182, 193, 198: n = A,T,C or G
ccatctcattttcaaagtncagagctacataacacagtttctccttgatgtcccggacaatctcacgctcagcagtagtaacgaaggaatagccacgctcagtcaggatcttcatgaggtagtcagtgagatctcggccagccagatccagacgcatgatgncatggggcaagnnatagccntcatagatggngacantgtgggtgacaccatctccagagtccagcacgatgccagttgtgc

SEQ ID NO: 810 - DNA, 274 bp, Homo sapiens
aaaaaacacgtttgttattaccaaaaagagacgtctttaggtaaaaataataaaaaccccatgctgcattgataatgcagatagttctatttatctggtcaacgggcaaaaagcaagcactttaggtcttcagctccaatcttttgttcatttcttattgctggaatttcatatttcttcttgttggatgactaaaccggatgatggtagagatggtaagccggcatttactcagccccgccctgctcagcctcgggagcggacgaattctcag

SEQ ID NO: 811 - DNA, 205 bp, Homo sapiens
ctggtggagatcatcaaggtgctgggaacaccaacccgggaacaaatccgagagatgaaccccaactacacggagttcaagttccctcagattaaagctcacccctggacaaaggtgttcaaatctcgaacgccgccagaggccatcgcgctctgctctagcctgctggagtacaccccatcctcaaggctctccccactagagg

SEQ ID NO: 812 - DNA, 199 bp, Homo sapiens
aaatattgctgctgctttgtagatgatgagaagaaatgttaaagtgctttctaaaaggaaattttttcacctttggaggagaatatattagagttgtgggtaatttttcacagccacctatgtacatactaattacccattggatacttatatctaaaagtctcatgctgaagtatagtttttgggaaagaatgatttt

SEQ ID NO: 813 - DNA, 334 bp, Homo sapiens
  misc_feature 40: n = A,T,C or G
cctcaccgccgatgcaaggatagtcatcaacagggcccgngtggagtgccagagccaccggctgactgtggaggacccggtcactgtggagtacatcacccgctacatcgccagtctgaagcagcgttatacgcagagcaatgggcgcaggccgtttggcatctctgccctcatcgtgggtttcgactttgatggcactcctaggctctatcagactgacccctcgggcacataccatgcctggaaggccaatgccataggccggggtgccaagtcagtgcgtgagttcctggagaagaactatactgacgaagccattgctctgcgacctgcc

SEQ ID NO: 814 - DNA, 358 bp, Homo sapiens
ctgaagcttggaacttctggacaagaaaaggcctggtttctggtggcctctatgaatcccatgtagggtgcagaccgtactccatccctccctgtgagcaccacgtcaacggctcccggcccccatgcacgggggagggagatacccccaagtgtagcaagatctgtgagcctggctacagcccgacctacaaacaggacaagcactacggatacaattcctacagcgtctccaatagcgagaaggacatcatggccgagatctacaaaaacggccccgtggagggagctttctctgtgtattcggacttcctgctctacaagtcaggagtgtaccaacacgtcaccggagagatgat

SEQ ID NO: 815 - DNA, 203 bp, Homo sapiens
ctggaagccggactcagccagggtgcgctactaccagagcctgcaggctcatctcaaggtggacgtgtacagacgctcccacaagcctctgcccaaggggaccatgatggagacgctgtcccggtacaagttctacctggccttcgagaactccttgcaccccgactacatcaccgagaagctgtggaggaacgccctggagg

SEQ ID NO: 816 - DNA, 92 bp, Homo sapiens
cggccgcagaagcgagatgacgaagggaacgtcatcgtttggaaagcgtcgcaataagacgcacacgttgtgccgccgctgtggctctaagg

SEQ ID NO: 817 - DNA, 367 bp, Homo sapiens
ttggaggactatttgaattttgcaaactatctcttgtgggtttttacaccactaatacttttaatacttccttactttactatctttcttctctaccttactattattttcttacacatttataagagaaagaatgtattgaaagaagcctactctcataatttatgggatggtgcaaggaaaacagtggcaactctgtgggatggacatgcagccgtttggcatggttatgaagttcatggaatggaaaaaataccagaagatggaccagcacttataattttttatcatggagctattcctatagatttttactatttcatggctaaaatatttatacacaaaggcagaacttgccgagtagtag

SEQ ID NO: 818 - DNA, 381 bp, Homo sapiens
aaataaaagtattacgtaactttgaaatttgtataaaattaaaagatagtaaaaacaactattctaacagaattcaaaacctgttatgcttcagtggagagattattcaagataagtccgtgggaaattgggagtacatttctactggcaaagttagtgataactatgcacttctgacaaaatgtgaaatggggggtatgggcgtgtcatatcatcatggtgcagatacgtggatgtgtgcttccaaacaatggcaacctaactgactgctggaaccatacaaaatacctgaaactactcagaaagaaggtgaaaattgcatgcaaaaattatttgaaaaatattgagctaacacaacatgaatttggaattataagtgag

SEQ ID NO: 819 - DNA, 109 bp, Homo sapiens
ccatggccgcttccagaccatggaggagaagaaagcattcatgggaccactgaagaaagaccgaattgcaaaggaagaaggagcttaatgccaggaacagattttgcag

SEQ ID NO: 820 - DNA, 309 bp, Homo sapiens
  misc_feature 110, 134, 164, 185, 235, 291, 304: n = A,T,C or G
ctggaaaaacctttcagcgaaccatttcagctcaggacacgttagcgtatgccacagctttgttgaatgaaaaagagcaatcaggaagcagtaatgggtcggagagtagncctgccaatgagaacggagacagncatctacagcagggttcagaatctcccatnatgattggtgagttgagaagngaccttgatgatgttgatccctagaggaacatgcccagcctgagaggagncaagacacaatactggatgctcagcaccttctttggaatcagaatctcgaaccctntggaagagcctgnagatt

SEQ ID NO: 821 - DNA, 236 bp, Homo sapiens
catccgcttcctgaatgctgagaatgcacagaaattcaaaacaaagtttgaagaatgcaggaaagagatcgaagagagagaaaagaaagcaggatcaggcaaaaatgatcatgccgaaaaagtggcggaaaagctagaagctctctcggtgaaggaggagaccaaggaggatgctgaggagaagcaataaatcgtcttattttattttcttttcctctctttcctttccttttttt

SEQ ID NO: 822 - DNA, 388 bp, Homo sapiens
  misc_feature 117, 360: n = A,T,C or G
gcgaggcaagatggagttagtgcaggtcctgaaacgcgggctgcagcagatcaccggccacggcggtctccgaggctatctacgggtttttttcaggacaaatgatgcgaaggttgntacattagtgggggaagacaaatatggaaacaaatactatgaagacaacaagcaattttttggccgtcaccgatgggttgtatatactactgaaatgaatggcaaaaacacattctgggatgtggatggaagcatggtgcctcctgaatggcatcgttggcttcacagtatgactgatgatcctccaacaacaaaaccacttactgctcgtaaattcatttggacgaaccataaattcaacgngactggcaccccagaacaatatgtacct

SEQ ID NO: 823 - DNA, 353 bp, Homo sapiens
  misc_feature 177, 297: n = A,T,C or G
aaaagtttggatctttttctcagcaggtatcagttgtaaataatgaattaggggccaaaatgcaaaacgaaaaatgaagcagctacatgtagttagtaatttctagtttgaactgtaattgaatattgtggcttcatatgtattattttatattgtacttttttcattattgatggnttggactttaataagagaaattccatagtttttaatatcccagaagtgagacaatttgaacagtgtattctagaaaacaatacactaactgaacagaagtgaatgcttatatatattatnatagccttaaacctttttcctctaatgccttaactgtcaaataattataacctttt

SEQ ID NO: 824 - DNA, 264 bp, Homo sapiens
  misc_feature 186, 223, 226, 249: n = A,T,C or G
ctgggtgcaggcgggctgagtccgaaaagagagtcagcaaagggagatggggtggggccgttttataggattagggaaggtaatggaaaattacagtcaaagggggtttgttctctggtgggcaggtgtggatctcacaaagtacactctcaagggtggggagaattacaaaggaccttcttaagngtgggggagattacaaagtacatttatcagttagggnggngcaggaacaaatcacaatgttgnaatgtcatcagttaa

SEQ ID NO: 825 - DNA, 361 bp, Homo sapiens
  misc_feature 210: n = A,T,C or G
aaaatccagtttgttgttaacaaaacctactgctgggtggttttgaatatattacttttaggcatgatctccccaatgtgtttttactccttttccggcttctaggacagaggtatgtagtcaaagaatcctatggtggatctgaattgggtttcagctactgtacctggtccttgtgaattaaaaaaataaagtcacaaaaaccatatnacaaaacaaattaaaataaatagacaaaatgaagctgtctccagaccttctgcattgacacacaggtttgaagtcaaccaaagcactcatgctaatctggatgggaacactagggagacagaaaccccagtatgaaaccatgtacttgagc

SEQ ID NO: 826 - DNA, 195 bp, Homo sapiens
  misc_feature 10, 26, 32, 44, 162, 179: n = A,T,C or G
ccccagaagngacgcagccctctatnggcccnaatcttcttcantcgctccaggtcttcacggagcttgttgtccagaccattggctaggacctggctgtattttccatcctttacatccttctgtctgttcaagaaccagtctgggatcttgtactggcgnggattctgcataatggngatcacacgttccacc

SEQ ID NO: 827 - DNA, 227 bp, Homo sapiens
caacggctcttcacagaccacctccttttctaaggaaaatggctggtatgacgtgatgagtgatacatattttgattcaggttttgtctctaaagtagcacttcttaccacagagatcaaggacttgggtaatattatgcttttttccttcaatggattaattttcttaatataaaaacagatgaataccaggctaagcactagaaagagtagtaaagcagcaacaa

SEQ ID NO: 828 - DNA, 242 bp, Homo sapiens
  misc_feature 65, 214, 222: n = A,T,C or G
atgtccggggagtcagccaggagcttggggaagggaagcgcgcccccggggccggtcccggaggntcgatccgcatctacagcatgaggttctgcccgtttgctgagaggacgcgtctagtcctgaaggccaagggaatcaggcatgaagtcatcaatatcaacctgaaaaataagcctgagtggttctttaagaaaaatccctttggtctggngccagttntggaaaacagtcagggtcag

SEQ ID NO: 829 - DNA, 374 bp, Homo sapiens
  misc_feature 339: n = A,T,C or G
gaggtcctgaaaaggaatacacttccatatcatgccatctcttacactggcattccttgcctatgcatgtgcatggcttgccctggtttagcttggaaactgattgaaagtcagagagatcactggctttgagacttgcttgggggacttgggtagcgtcagaggagtcttccttcttactctctgatgggagccttggaacagaagttctcaaaggctcaacgactgcccctgcgtgattagcatcgagagaagtagagctttctcctgcactgaactctttaggggatgaaattcccagcccactgctgccatcaggtgagtcagtctggcttttgngcttgagttgactgctggaagaagacgctattgta

SEQ ID NO: 830 - DNA, 325 bp, Homo sapiens
  misc_feature 239, 313: n = A,T,C or G
gttcaaagcagaaaatcctgagcctctagtgtttggtgtgaagtacaatgcaagttcttttgccaagttcacgcttattgtgacagatgtgaatgaagcacctcaattctcccaacacgtattccaagcgaaagtcagtgaggatgtagctataggcactaaagtgggcaatgtgactgccaaggatccagaaggtctggacataagttattcactgaggggagacacaagaggttggnttaaaattgaccacgtgactggtgagatctttagtgtggctccattggacagagaagccggaagtccatatcgngtacaagtggtg

SEQ ID NO: 831 - DNA, 85 bp, Homo sapiens
tggtaccgggccccccccctgagcgatggagcgtgggtagggagggtccacagtgtccactcgccgtgtgcgaaggttgactcgg

SEQ ID NO: 832 - DNA, 202 bp, Homo sapiens
aggcggagaggatcatgtccgggaactgcggggtagtagcgatctgggttacccagccgttgtggcccttgagggtgccacgaagggtcatctgctcagtcatggcggcggcgagagcgtgtgtcgctgcagcgacgaggatggcactggatggcttagagaaactagcaccacaacctctcctgccgtcgacgcggccgcg

SEQ ID NO: 833 - DNA, 503 bp, Homo sapiens
  misc_feature 434, 477, 495: n = A,T,C or G
ccggctggtcctgcatcgccatctgctggccgcgcggcacggccggttcctggagccagcaggagtcggaggctgcagggcttgaaggcctcttcaccgtgccctccagggagcctagctgccgaagtattcctgctggaacttctggaagtcttcctcggtgaacacggtgccctcagccttcttcttcttggtcttggccacaggccggtcacaggccttgcggccccggttctggcgcaaaatctgctggctcacagactcagccacggtgcttctcgtcctggtcagaaacttcaggtttactctgaggtggtctcgacactctcgcttccggtactcgtccagtgccgacttgggcacctttcccttggccgagttccgcagtttctgggcctgaattgccttcgtcttccggggccgtttcaccggancccctctcggcttggcctgacctggagggtcccggggggcctnggacgccgccagcagctncaggcccc

SEQ ID NO: 834 - DNA, 208 bp, Homo sapiens
atccagagacaatctgccggttgtcagaggagaaggccacactcagcacatccttggtatggcccacaaatcgcctcgtggtggtgcccgttgtgagatcccagaggcgcagggttccatcccaggagcctgagagggcaaactggccatctgaggagataaccacatcactaacaaagtgggagtgaccccgcagagcacgctgtgg

SEQ ID NO: 835 - DNA, 210 bp, Homo sapiens
  misc_feature 88: n = A,T,C or G
tgatgtgggcgattgatgaaaaggcggttgaggcgtctggtgagtagtgcatggctaggaatagtcctgtggtgatttggaggatcangcaggcgccaaggagtgagccgaagtttcatcatgcggagatgttggatggggtggggaggtcgatgaatgagtggttaattaattttattagggggttaattttgcggtcgacgcggccgc

SEQ ID NO: 836 - DNA, 426 bp, Homo sapiens
cggccgccacgctggttttgcatcttcaggagacgctcgtagccctcgcgcttctcctcggccaattcgcggaagaagtggctcacgccttccagagccacatcatcgcggtcgaaatagaagcccagagagaggtaggtgtaggaggcctgcaggtacaaattgaccaggctgttgacggctgcctccacgtcggtggaataattctgacgaatctgggagctcatggttggttggcaagaaggagctaaccacaaaaacggtgctggcaggtcccagaagcaggagatggccgagaagatggtcccggaggttgcaagcggagaggaaatcggagggcggtcggaggctggaagagagtccccggatctgttccgtccaaacactgttgaagcaagagacagacccgcggtcgacgcggccgcg

SEQ ID NO: 837 - DNA, 134 bp, Homo sapiens
ccagggccgtgggccgaccccggcggggccgatccgagggcctcactaaaccatccaatcggtagtagcgacgggcggtgtgtacaaagggcagggacttaatcaacgcaagcttatgacccgcacttactggg

SEQ ID NO: 838 - DNA, 538 bp, Homo sapiens
  misc_feature 480: n = A,T,C or G
ggcgtcctggtgcttaccacctggaaactggtgaggtggtgggagaactcctggtggaccctagtggaagccttccagtaatttcttgaagctgagcgctcaggtgagtagggcgacatctggtggccggttgttgaaggtcattgcagagaggaaggaagccgaggaggggagcctgcagtgagggcgtcctggggttctccggttctcaccacccttgggccacgccgtctagtccacacctgaggagttggtcaggtagaaggggcggatgaccgtgcggaagccgttgaagtgccctgccgggcaggggaaggaggaggtgctcttcgagctgttggtgtccagggcactgggaatcgcagccttccagccctcgaaatcggtgacgtctgccacgaagagcccttcgcagagcatcagggctttgttttcgtaggcaatggtgcgatctgagccgccagacttggtgaggcccangacagggagctcgtccgaggagcaggagaagccgtagttccagcagctctggatggtg

SEQ ID NO: 839 - DNA, 351 bp, Homo sapiens
aaggcggcaacggtggtgaaagatatagcaggcctggtctttgtacagcggatgctcgtgaagagggggcgagcggtagaaccttgggtccttgtagccgcggtcccagggcggaaagatcggccgcgccagccagggcacgaagtgcatcttccccgcaaaggtgatgggctccagtccagggatctcgtaccccctatccaggggaggaggctccgacttccgcgtggagcgcacgccccactcatacgccccgcgtctcggggccccgaagcccccaaggccgagctgcccggagccagctagcgcccgccttgcgggcccggacgccaatgccataccgatctgata

SEQ ID NO: 840 - DNA, 574 bp, Homo sapiens
tggcctgcaaggccgcggacagggcgagcaccgagtcgtacattttgcagctcatcatccccgtgctctgcgtgacgcagtccatccacagccccttgtacatggcctgggccgtgatgatgttgtcacccgcataggagctcatctgccactgcgggatggcggtgcaggccaccagacccacccagcccagcagggccatggagaagcccagcaactgcaggcccgaattggccatttccgccctcagaaaacactgggggcgccgggcgggagaccctacagtaaaacaaacgacacttggggggcagccccacaaaagaaaacttgaggtggagttttccggtcacccaaagagacaaaaagggtttgggccaggtgaatgcaaatcttgtcaccaaactacacacaaatcgacccctccagtgaagcgatggcctcgcggcacagggagtaggatacgccgggagggtggttccagacaaaattggtggtccccgaaggccaggcggttccctccggcgctctcggcgaccctaggcaaacaaaaggtggaggggccgtctgggcgcgt

SEQ ID NO: 841 - DNA, 195 bp, Homo sapiens
gacccaggggcacaggctcccagatgatagcccctctctgaatgagcacccaggcaacacagtccggggctgtgtgtagcaaacctgtcagcagctgcctcctgggacaaccacccccttacatgctatctatctaccagacaaatgaaagctcttcttaccccatctcccaggcaccccccagcaagggctctg

SEQ ID NO: 842 - DNA, 207 bp, Homo sapiens
  misc_feature 85, 87, 89, 101, 127, 138, 139, 147, 149, 150, 191: n = A,T,C or G
cggccgccctttttttttttttttcgttgaaaaccaataatttatcaaaacgctgcgtgtgtatgtgggggggagggtgtcacancncncagggcagcggngggcggacgcacaggcaggaaacggngcccggaaagnnggggcggnannttgccactggctggccatgcgggcgggcaggctaaacattnttgccgcgcaggcgca

SEQ ID NO: 843 - DNA, 62 bp, Homo sapiens
cgatggagcgtgggtagggagggtccacagtgtccactcgccgtgtgcgaaggttgactcgg

SEQ ID NO: 844 - DNA, 118 bp, Homo sapiens
ttgggtacactccctggtaccgggcccccccgatccggctgccagccctgaggccaagcacggctggagacccacgacctggcctgccgttgccctgagctgcagcctcggccccagg

SEQ ID NO: 845 - DNA, 99 bp, Homo sapiens
gtacactcccctggtaccgggcccccccactaccgagtcaaccttcgcacacggcgagtggacactgtggaccctccctacccacgctccatcgctcag

SEQ ID NO: 846 - DNA, 559 bp, Homo sapiens
  misc_feature 37, 552, 554: n = A,T,C or G
cggccgccctttttttttttttttggttgtggctganaatgctggagatgctcagttctctccctcacaaggtaggccacaaattcttggtggtgccctcacatctggggtcttcaggcaccagccatgcctgccgaggagtgctgtcaggacagaccatgtccgtgctaggcccaggcacagcccaaccactcctcatccaagtctctcccaggtttctggtcccgatgggcaaggatgacccctccagtggctggtaccccaccatcccactacccctcacatgctctcactctccatcaggtccccaatcctggcttccctcttcacgaactctcaaagaaaaggaaggataaaacctaaataaaccagacagaagcagctctggaacaaaaagtacaaaaagacagccagaggtgtgcggagagggtgaggtggccgcgtggacgtgggtagataatcgcatgcagcactggaactcctgatgaggggtggggtccccacttctcctcaaggtttgagggattggggggagggggtcagctgactcananaagta

SEQ ID NO: 847 - DNA, 430 bp, Homo sapiens
cggccgccacgctggttttgcatcttcaggagacgctcgtagccctcgcgcttctcctcggccagttcgcggaagaagtggctcacgccttccagagccacatcatcgcggtcgaaatagaagcccagagagaggtaggtgtaggaggcctgcaggtacaaattgaccaggctgttgacggctgcctccacgtcggtggaataattctgacgaatctgggagctcatggttggttggcaagaaggagctaaccacaaaaacggtgctggcaggtcccagaagcaggagatggccgagaagatggtcccggaggttgcaagcggagaggaaatcggagggcggtcggaggctggaagagagtccccggatctgttccgtccaaacactgttgaagcaagagacagacccgcgggacgtcgacgcggccgcg

SEQ ID NO: 848 - DNA, 546 bp, Homo sapiens
  misc_feature 146, 162: n = A,T,C or G
agagtaaagtgcagcctctccagacactggggccccagtgggcgtgggcgaagttgctggtaggaggagttggcggaagcacttggaactcctttataagtgtcagctgtgagattttaatttgatttgaaaatgagtaagtgcanaaagacaccagttcancagctagcaagtcccgcgtcattcagcccagatattcttgctgacatttttgaactctttgccaagaacttttcttatggcaagccacttaataatgagtggcagttaccagatcccagtgagattttcacctgtgaccacactgaatttaatgcatttcttgatttgaagaactccctaaatgaagtaaaaaacctactgagtgataagaaactggatgagtggcatgagcacactgctttcactaataaagcggggaaaatcatttctcatgttagaaaatctgtgaatgctgaactttgtactcaagcatggtgtaagttccatgagattttgtgcagctttccacttattccacaggaagcttttcagaatggaaaactg

SEQ ID NO: 849 - DNA, 196 bp, Homo sapiens
gaagtccttcagcaggccacgctcggacagggtgcgcctcaaggacttctttctgatgagggggaccttgtacatgatgcactcagagagcgccaccagacccagcagcagcagccacttcatggttcttcccgggtcccaactcgagggagaaggcgtcgacgcggccgcgaattccaccacactggactagtgg

SEQ ID NO: 850 - DNA, 543 bp, Homo sapiens
cactgatattggagaaaagcacatccggcataaagtgtaaaccagtgtctcaaacactggaagaaccgggagagcaaacatgatttttcttatttcctctaagtaatctttctttagtaaaacaacaagtgatctttggcatagattcatactttaaaggcattaatattgcatttatatcaggcaagcaactatacaaatatgctgagggccttgaaaataatcatcctcattttaaaggaaatagtgaaagcctgagtgtaaaggaccaacttaagttgtacacattcgatgttgggaactaacacacagcgatgggtgggaaggaaggatgttcaggcaaggttcttactcctttactcatctggttctggctttgggaaaaaataaggtttcatgtgctgggaaatacttagcagtaataagtaccaaaaaggaaacactgccctctcattttgcctagtaggaacttactgtggtgataagaaatatgaaacccattactctcttgaaccccatacttgggagtagatgcagagagct

SEQ ID NO: 851 - DNA, 190 bp, Homo sapiens
aggcggagaggatcatgtccgggaactgcggggtagtagcgatctgggttacccagccgttgtggcccttgagggtgccacgaagggtcatctgctcagtcatggcggcggcgagagcgtgtgtcgctgcagcgacgaggatggcactggatggcttagagaaactagcaccacaacctctcctgccgcc

SEQ ID NO: 852 - DNA, 407 bp, Homo sapiens
  misc_feature 38: n = A,T,C or G
aggcctcacagaggcgggggcagaaggcggcgacccanagccgccacatcccccgccttgggcgccgtcacagtccccagacgccctggactcctgcagtctacgaagacgcgcgggggacggcgtggttccgagagagggcgccaaaggcgacgtgccggccgccagctccaggccgagccccgagcgcctgcaggaacaggccccttcacccggcgcgggacgcagagctgcgagagaatcttgttcagcgcggactcaacgccagggcgccgcctagaggttggtctctgtctcggcctcacccgccgggagaccacagagctgcttccccagccgcccgccgccagaaattggaaaaaaaaaaatccagctggggtctaggaactcggcttctggcacctctg

SEQ ID NO: 853 - DNA, 626 bp, Homo sapiens
acagtcccagtactctttgctcagctttcggggccggcctcgtttccgcttcccgtgcttgggatcccccttcttgcagtcacgaaaaccatcgctggggaagagcttgccatcagtgggatccaggtccacgtcacttccaccggagtctgaggagtgggagctccgagaagcaccagtccctgcggtggagacgtcagagctgccgggggagggggctcctgcgccacagctgccggggtggtaggggctggcttgctgaccgtcgtccagcagctcctgggcaaaggggctgccctggtcaaagggccctgggtctagggcctcctggaaggccatgccatccttctccagcagctcaatgatccaactgagctcatcagaagagctggaagtgaggtctcgcagctgggcatggagttggtcccccagaggcccaaagaccagacgcagctcctcaagggcacaattgcagagggtggcgccatccatgtcacatcgtgagaagtcaatggcgcttgcgtcgtacttgttcttctccacttggtagctgatccagtccagaacctgcgtcttcgaccagaactggggctgttcccccaaccagctggccttctctgtaccct

SEQ ID NO: 854 - DNA, 218 bp, Homo sapiens
atgacggctgcccgaagccccccgagattgcacatggctatgtggagcactcggttcgctaccagtgtaagaactactacaaactgcgcacagaaggagatggagtatacaccttaaatgataagaagcagtggataaataaggctgttggagataaacttcctgaatgtgaagcagtatgtgggaagcccaagaatccggcaaacccagtgcagcgg

SEQ ID NO: 855 - DNA, 50 bp, Homo sapiens
gaggaacgaagaataaaggagattgtgaagaaacattctcagtttattgg

SEQ ID NO: 856 - DNA, 116 bp, Homo sapiens
tccactagtccagtgtggtggaattcgcggccgcgtcgacgccccgcgagcacagagcctcgcctttgccgatccgccgcccgtccacacccgccgccagctcaccatggatgatg

SEQ ID NO: 857 - DNA, 402 bp, Homo sapiens
ggcgacgaccccaagagggaggtgggccacgatttctacttcttttttcaccattcgacagttccactcttacacggcagccacatagtgttcttccatctagctctcggactgcatcagctgcatctcggggatcttcaaattcaacaaaagcaaagccgggtgggtttctagcaacccacacacttcggagtggtccatagtagccaaaagcccgttccaattccgtcttgttgccattgtttccaagattgcctacataaaccttacagtccaatggacaggaatcacgatgcatttcgagatctagggttaaaaaatgcggcggctcaaatccacacgctccgatgagtcttcccgctttcctccggcccaacaccaaccaacgtcgacgcggccgcg

SEQ ID NO: 858 - DNA, 172 bp, Homo sapiens
acattttatgacctctcccaataggggcagaggtgagcacccctggtgaaaagttaagactcagtgagtataaatacgccaagaagagctgtggcttctttcactggtgtcctcagaaaggctgtgagcagtgttggtggcatacctgtcacagcatctagcaaagcacctg

SEQ ID NO: 859 - DNA, 196 bp, Homo sapiens
aggcggagaggatcatgtccgggaactgcggggtagtagcgatctgggttacccagccgttgtggcccttgagggtgccacgaagggtcatctgctcagtcatggcggcggcgagagcgtgtgtcgctgcagcgacgaggatggcactggatggcttagagaaactagcaccacaacctctcctgccgccggtcga

SEQ ID NO: 860 - DNA, 538 bp, Homo sapiens; identical to SEQ ID NO: 838
  misc_feature 480: n = A,T,C or G

SEQ ID NO: 861 - DNA, 204 bp, Homo sapiens
aggcggagaggatcatgtccgggaactgcggggtagtagcgatctgggttacccagccgttgtggcccttgagggtgccacgaagggtcatctgctcagtcatggcggcgacgagagcgtgtgtcgctgcagcgacgaggatggcactggatggcttagagaaactagcaccacaacctctcctgccgcgtcgacgcggccgcg

SEQ ID NO: 862 - DNA, 217 bp, Homo sapiens
aatgtcaggggtgttgggggctttggctgggtcctgggtcttcgtgtagagacctggaggcgcttggttcttggggttctccaggattccagcctcgtagctgatgtgcatgaggttctcatccatgctccacgggttcttgggagtgaccgggatgggaatcccgtgttgctttgcgtactccatcaggtcattgcggcccttgaaccggttgtag

SEQ ID NO: 863 - DNA, 192 bp, Homo sapiens
aggcggagaggatcatgtccgggaactgcggggtagtagcgatctgggttacccagccgttgtggcccttgagggtgccacgaagggtcatctgctcagtcatggcggcggcgagagcgtgtgtcgctgcagcgacgaggatggcactggatggcttagagaaactagcaccacaacgtcgacgcggccgcg

SEQ ID NO: 864 - DNA, 147 bp, Homo sapiens
tttccccttgaagaagtagacccgctcccggccactgtagctatgggcagggagggccaaggctgcatccacgttgtccgggatgccatcgaagccgtcagagatatttcgggggtaatcagggtccaggacaccatcctcaaagcg

SEQ ID NO: 865 - DNA, 446 bp, Homo sapiens
cggccgctggacttggcttgagctgtgaggggtgggaggggaggatagcaccggaagatgctgctccgggcccaacaccagccctggccaggctctcccctcccaggggcagcgcccagtccccaggggctgccagagccctgtgtgccttgccgcattcccctgatgcagcttttggcaactgaaaggcagggctctcgctgagtgcacctggggcttcctgagcccatctgcggcggccccaccctggcctaggtgctgagtgcagctgctgcagacagcccctccctccttagtggagcctggagggtggggtgctcggggatgcaggcaggggcaggggctccagagccacaggtcagaagcagggctgggggaggggtggagccattcagcctcaggcaccctcacagctaggtgactaggggcagggacagaatggggtg

SEQ ID NO: 866 - DNA, 87 bp, Homo sapiens
tccctcaactggaccatgggcctgcccaccgacaatggccacgacagcgaccaggtgtttgagttcaacggcacccaggcagtgagg

SEQ ID NO: 867 - DNA, 123 bp, Homo sapiens
  misc_feature 2: n = A,T,C or G
cncctggtaccgggcccccccactttaaaatcttttgttaagaaataggaaagattaggaaatatcatactgcacctgaaatgctgcagcaggggtttttgtttgcttgtttttgtccttcag

SEQ ID NO: 868 - DNA, 634 bp, Homo sapiens
caggctgcggtaggtggcaatctcctgctccagccgcgacttgatgtccatgagccgctggtactcctgattctgccgctcactatcagctcgcacatcgcccagctgggcttcaataccgctgatcagcgcctggatatgcgccagctgggctccaaagcgcgcctccgtttctgccagtgtgtcttccaaggcagctttcatgctcagctgtgactgcagctcaatctcaagaccctgaagggtgcgccgcaggtcagtaacctcggacctgctcatctggagctgctccgtgtggccagcgacctcccggttcaattcttcagtccggctggtgaaccaggcttcagcatccttccggttctgctcggccatgacctcatattggcttcgcatgtcactcaggatcttggcgagatcggtgcccggagcggaatccacctccacactgacctggcctcccacttggcccctcagcgtactgatttcctcctcatggttcttcttcaggtaggccagctcttccttcaggccttcgatctgcatctccaggtcggtcctggccagggtcagctcatccagcaccctgcgcaggccgttgatgtcggcctccacgctcatgcgcagagcctgt

SEQ ID NO: 869 - DNA, 197 bp, Homo sapiens
aggcggagaggatcatgtccgggaactgcggggtagtagcgatctgggttacccagccgttgtggcccttgagggtgccacgaagggtcatctgctcagtcatggcggcggcgagagcgtgtgtcgctgcagcgacgaggatggcactggatggcttagagaaactagcaccacaacctctcctgccgccgtcgacg

SEQ ID NO: 870 - DNA, 579 bp, Homo sapiens
  misc_feature 155, 215, 224, 246, 262, 272, 288, 313, 316, 382, 426, 433,469, 482, 483, 507, 518, 521, 530, 564: n = A,T,C or G
cggccgcccttttttttttttttttttttttttttatggggccaattttaaatagttttatttaagacattgcattttccacttacaatacagtgtttataaagtgcaatgttatttccttcccctgtgcatatgttccatattcaagtattganaatgcccagtaacttactatagcagcttaactttttaaaactgccacagaatttgctacnaatttaggnccttcaaatgttttaaatgtgnggaacaatgctacatntacacttggntggcttaatcaacctnttcaatggggggccctgaggaagcnccnccagagggaggagctccaccaccaggaaatcccccaggcattcctcctggcatgcctcctgcactntggtacagcttggtgatgatggggttgcaaactttctccagctntttctgntgatgttcaaattcttccttctcagcagtctgattnttatcaagccagnngataatttcattacacttgtccanaatcttctgtntgncctcatcgntaatcttgccttgaagtttctcatcttcaacagntgctttcatgttgaa

SEQ ID NO: 871 - DNA, 518 bp, Homo sapiens
ctttctccttcttatagacgttccggacgggcatgaccggtccggtcagctgggtggccagtttcagttcttcagcagaactgtctcccttcttgggggccgagggcttcctggggaagaggatgagtttggagcggtactccttcagccgctgcacgttggcctgcagggactccgtggacttgttccgcctcctcggatccacagaaatgccgatggtccgggccaccttcttgtgaatgccggccaccctgagctcctccaggctgaagccgcggccggcgcgcaccttcgtgtggtaccgaaccgtggggcagcgcacgatgggccggatgggacccgacgcggggcgcggggcgatgcggcgcgccttggcttgccgggccttacgtctgcggatcttacgggccggctggttgaaccacgtggccacgcgccgctgccagtccttgtggaagtggggcttcaagaccatgccattccggctgggcgccatggctgcctacggccctgcggct

SEQ ID NO: 872 - DNA, 404 bp, Homo sapiens
ctaaacactgtccagcgcaggggggtgctagggaggtagcgtgacaacacgatggctgcgatgcctgaagtgatgaccacgatggcggaagtgacagagaggatgttgaccacgcagtactgcagagccaccgcatcttgaggggtgcccacgtagcgcagcactgtgccatggaacagggcagctgtgatgaagctcacatggcccagcaccaccagcaccaggcctgtcttcatcagcaccttccggaagtcgcccacactcaggcctccgaggcgcagacacatgtcggctccgcgctggtcccgcccccggcttcagcgcggctcccgaggctgcgggccgccgggggaccctgctcccatcccgctggcccgtcgcccgcgcgccccgcaccgtcgcgt

SEQ ID NO: 873 - DNA, 175 bp, Homo sapiens
ggctgccagcgcctctaccccgtgctgcagcagagcctggtgcgggccgcccgccgcaggggcgccgccgcccagccctgaaccagaagcctgagcaactacggacgcaagccgaggaccgtgctgccgccgtccacgaaaagacccgcgccatcggcctccagtttgcgtcgag

SEQ ID NO: 874 - DNA, 215 bp, Homo sapiens
ggtagagaaccctgcggctgcgctttcggtgcccgcgagaggcgctggggcgcccggcaggggccgctgcgggctccgggagagggtcgaaggtgaagatctcaggaccggagccccgccggggtcccgggatggtggagggggccggggtcggggcctgcaggatggtcatggtcgggtggcagctgcgagagtgacacatggtgagccgagcg

SEQ ID NO: 875 - DNA, 208 bp, Homo sapiens; identical to SEQ ID NO: 834

SEQ ID NO: 876 - DNA, 484 bp, Homo sapiens
gagcagctggtttctcctggacagcagcatctggctccgctcccttcggaactccaggtactccttattgtttttgagcttgttcatgcagtccatgagggctgggtagccacctgagaatcgccacaggtgcactgcctggtcctgctccccataccacgtgttccagttgcccacgagtgagcatgggtagtcctcatccaggtgaagcttgggcagcacagcctccgtgaggctgttgtaggcatccaggtattcaggctttacattgtgaaactggatcttatagaggttgctggtttccttcttggacagcagggtggagtgggcatccttccggggatccactttgtgaacaaagagggagcggaaccagctgccttcattgtccttggaatagaaacgcgccgcagctgcagacgcaacgtccccagcgcgaggccccgggccccccagcagccgccgcgccgtcacagagatgctg

SEQ ID NO: 877 - DNA, 558 bp, Homo sapiens
ggcgtcctggtgcttaccacctggaaactggtgaggtggtgggagaactcctggtggaccctagtggaagccttccagtaatttcttgaagctgagcgctcaggtgagtagggcgacatctggtggccggttgttgaaggtcattgcagagaggaaggaagccgaggaggggagcctgcagtgagggcgtcctggggttctccggttctcaccacccttgggccacgccgtctagtccacacctgaggagttggtcaggtagaaggggcggatgaccgtgcggaagccgttgaagtgccctgccgggcaggggaaggaggaggtgctcttcgagctgttggtgtccagggcactgggaatcgcagccttccagccctcgaaatcggtgacgtctgccacgaagagcccttcgcagagcatcagggctttgttttcgtaggcaatggtgcgatctgagccgccagacttggtgaggcccaggacagggagctcgtccgaggagcaggagaagccgtagttccagcagctctggatggtggggaggtagaccagggacca

SEQ ID NO: 878 - DNA, 503 bp, Homo sapiens
  misc_feature 132, 185: n = A,T,C or G
cggccgcaaccgcgcgaacccgaagtcgatgattttcaccggggccccgggcgtgtcgtcggcgtacaggatgttctccggcttgaggtcgcggtgcaccacgcccgcctcctcgtgcatgaagctcacggncgacacgaggctgcgcaggatctggcttgcttccgactcgctgaagtgccgcntcttgcggatgtgctccagcagctccccgccccgcagcagctccaggaccaggtacgtgtgcagctggtcgtgatgcacctcgtgcagattcaccacgttggggtgtgactggcacaggcgcagggcagccacttcgcgctgcgtgttcgcctccagcctgcgactgaggatcttgactgcgaactcctggccgctctggcgctggcggcagcggcgacacacagaaaagctgccctggcccagcgcaggctcccgcaggtccagctcgtactgctggaagaagggcgagtcctgcatcatagcgctcctggccaccg

SEQ ID NO: 879 - DNA, 78 bp, Homo sapiens
ctgcctcggctggcgggcggggggaggcggagagctcggggcacgcgctgccgtccggaccgcgtcgacgcggccgcg

SEQ ID NO: 880 - DNA, 211 bp, Homo sapiens
tgatgtgggcgattgatgaaaaggcggttgaggcgtctggtgagtagtgcatggctaggaatagtcctgtggtgatttggaggatcaggcaggcgccaaggagtgagccgaagtttcatcatgcggagatgttggatggggtggggaggtcgatgaatgagtggttaattaattttattagggggttaattttgcggtcgacgcggccgcg

SEQ ID NO: 881 - DNA, 373 bp, Homo sapiens
  misc_feature 37, 38, 88, 335: n = A,T,C or G
cccacagtggcttgtttccgcagtgcgcggccgtcannacccaactctggtccaccaggacacccgcgcagtggaacgagaggccgtngaagagcgagacctgccagggctgcgagccgcgcgcgcacggggcgccataggcttcggggtccaagcgcgtgtcgttttgggggagcagcgccgcctctgcggcccagagttgcgccatcagcagcggcagcagcttcgccagagcccgggcgccagaggcggcggagaggtggaggtgcggagctctcatggccaggatctgggagtcgccgataggaaggagggaggggacccagacgtgcctntgccctgcctgtggtctgccgcgtccgacacggccgcg

SEQ ID NO: 882 - DNA, 300 bp, Homo sapiens
  misc_feature 48: n = A,T,C or G
cggccgcgttttttttttttttttcagacaattcagcctttattttanaaaataattctgtagcttccactttctttcatgaaactgaggtcaggcaagaaacaaaaatccaccaagtcctctccatcctgccatggcgtcctggcctgtgaggacatggggcgcctgggagcgggcggggaggctgggcagcactgggccagaggcgtcctggtcactgctccacctggtcactgctccacctcatgctgagaggagcctgtgtgtcaaaccccaggggaaaaagggacaggcagatcg

SEQ ID NO: 883 - DNA, 230 bp, Homo sapiens
ggtagagaaccctgcggctgcgctttcggtgcccgcgagaggcgctggggcgcccggcaggggccgctgcgggctccgggagagggtcgaaggtgaagatctcaggaccggagccccgccggggtcccgggatggtggagggggccggggtcggggcctgcaggatggtcatggtcgggtggcagctgcgagagtgacacatggtgagccgagcggtcgacgcggccgcg

SEQ ID NO: 884 - DNA, 601 bp, Homo sapiens
  misc_feature 555: n = A,T,C or G
gcccccaattccagctgccacaccacccacggtgactgcattagttcggatgtcatacaaaagctgattgaagcaaccctctactttttggtcgtgagccttttgcttggtgcaggtttcattggctgtgttggtgacgttgtcattgcaacagaatgggggaaaggcactgttctctttgaagtagggtgagtcctcaaaatccgtatagttggtgaagccacagcacttgagccctttcatggtggtgttccacacttgagtgaagtcttcctgggaaccataatctttcttgatggcaggcactaccagcaacgtcaggaagtgctcagccattgtggtgtacaccaaggcgaccacagcagctgcaacctcagcaatgaagatgaggaggaggatgaagaagaacgtcacgagggcacacttgctctcagtcttagcaccatagcagcccaggaaaccaagagcaaagaccacaacgccggctgcgatgaggaagtagcccacgttgacaaactgcatggcactggacgacagtggcccgaagatcttcanaaaggatgccccatcgattgacacccagatgcccactgccaacagg

SEQ ID NO: 885 - DNA, 207 bp, Homo sapiens
  misc_feature 82, 83, 101, 127, 128: n = A,T,C or G
caggcggagaggatcatgtccgggaactgcggggtagtagcgatctgggttacccagccgttgtggcccttgagggtgccannaagggtcatctgctcagncatggcggcggcgagagcgtgtgtcnntgcagcgacgaggatggcactggatggcttagagaaactagcaccacaacctctcctgccgccggtcgacgcggccgcg

SEQ ID NO: 886 - DNA, 442 bp, Homo sapiens
  misc_feature 3, 10, 14, 17, 37, 41, 88, 122, 123, 152, 158, 282, 388, 422: n = A,T,C or G
cancttatanaaanggnaaaggaaaccccaacatgcntgcnctgccttggtgaccagggaagtcaccccacggctatggggaaattancccgaggcttagctttcattatcactgtctcccnnggtgtgcttgtcaaagagatattccgccnagccanattcgggcgctcccatcttgcgcaagttggtcacgtggtcacccaattctttgatggctttcacctgctcattcaggtaatgtgtctcaatgaagtcacacaaatgggggtcatttttgtcagnggccagtttgtgcagttccagtagtgactgattcacatttttttccaaatgtaatgcacactccattgcattcagcccgctctcccagtcatcacagtctggtttnttgatatcctgaaggaagattcggccacctcgtnggttctgcagcttcatcagt

SEQ ID NO: 887 - DNA, 222 bp, Homo sapiens
gctcaggctccaaagccagcaggaaagaggtagctcgggacgtggagccgccgcccaggtgcgccaggaccacctcggccgtcaccttagccaggtggctgcttaggtccactgtgcgcttcacgtcctcattgatcagcggcggtgcctcggaggaggcgctgcccggcgccggggcccaagtcccaagcaacaggagcagaaacaagccggcggctggcg

SEQ ID NO: 888 - DNA, 89 bp, Homo sapiens
ggtggcgtagcgcccgcttataaagccgcaacaccttttgctgatgggtcaggtagggtcccgacgccaagaacgccattacggccgcg

SEQ ID NO: 889 - DNA, 451 bp, Homo sapiens
  misc_feature 5: n = A,T,C or G
gcggncgctggacttggcttgagctgtgaggggtgggaggggaggatagcaccggaagatgctgctccgggcccaacaccagccctggccaggctctcccctcccaggggcagcgcccagtccccaggggctgccagagccctgtgtgccttgccgcattcccctgatgcagcttttggcaactgaaaggcagggctctcgctgagtgcacctggggcttcctgagcccatctgcggcggccccaccctggcctaggtgctgagtgcagctgctgcagacagcccctccctccttagtggagcctggagggtggggtgctcggggatgcaggcaggggcaggggctccagagccacaggtcagaagcagggctgggggaggggtggagccattcagcctcaggcaccctcacagctaggtgactaggggcagggacagaatggggtgaatt

SEQ ID NO: 890 - DNA, 66 bp, Homo sapiens
tccactagtccagtgtggtggaattcgcggccgcgtcgacctgctgcctcacccacagcttttgat

SEQ ID NO: 891 - DNA, 599 bp, Homo sapiens
  misc_feature 583: n = A,T,C or G
gggcgtcctggtgcttaccacctggaaactggtgaggtggtgggagaactcctggtggaccctagtggaagccttccagtaatttcttgaagctgagcgctcaggtgagtagggcgacatctggtggccggttgttgaaggtcattgcagagaggaaggaagccgaggaggggagcctgcagtgagggcgtcctggggttctccggttctcaccacccttgggccacgccgtctagtccacacctgaggagttggtcaggtagaaggggcggatgaccgtgcggaagccgttgaagtgccctgccgggcaggggaaggaggaggtgctcttcgagctgttggtgtccagggcactgggaatcgcagccttccagccctcgaaatcggtgacgtctgccacgaagagcccttcgcagagcatcagggctttgttttcgtaggcaatggtgcgatctgagccgccagacttggtgaggcccaggacagggagctcgtccgaggagcaggagaagccgtagttccagcagctctggatggtggggaggtagaccagggaccaggacaccctcttgtcctggaagangaagctggggtgttgt

SEQ ID NO: 892 - DNA, 113 bp, Homo sapiens
gtctcaaacaggaccgcatttccggcatttcggctggtgtccgtgttagtggccacctgggccagcaagtcattcatggtctcactgctctcctcgtggttccggcccaggat

SEQ ID NO: 893 - DNA, 208 bp, Homo sapiens
  misc_feature 160: n = A,T,C or G
gaggcggagaggatcatgtccgggaactgcggggtagtagcgatctgggttacccagccgttgtggcccttgagggtgccacgaagggtcatctgctcagtcatggcggcggcgagagcgtgtgtcgctgcagcgacgaggatggcactggatggcttanagaaactagcaccacaacctctcctgccggtcgacgcggccgcgaatt

SEQ ID NO: 894 - DNA, 67 bp, Homo sapiens
  misc_feature 9: n = A,T,C or G
gcgatggancgtgggtagggagggtccacagtgtccactcgccgtgtgcgaaggttgactcggtagt

SEQ ID NO: 895 - DNA, 58 bp, Homo sapiens
  misc_feature 50, 52: n = A,T,C or G
gcggccgcccttttttttttttttttttttttttttttttttttttcccncnctaaaa

SEQ ID NO: 896 - DNA, 177 bp, Homo sapiens
  misc_feature 24, 63, 84, 87: n = A,T,C or G
gacattttatgacctctcccaatnggggcagaggtgagcacccctggtgaaaagttaagactnagtgagtataaatacgccaanaanagctgtggcttctttcactggtgtcctcagaaaggctgtgagcagtgttggtggcatacctgtcacagcatctagcaaagcacctgaatt

SEQ ID NO: 897 - DNA, 542 bp, Homo sapiens
gctttctccttcttatagacgttccggacgggcatgaccggtccggtcagctgggtggccagtttcagttcttcagcagaactgtctcccttcttgggggccgagggcttcctggggaagaggatgagtttggagcggtactccttcagccgctgcacgttggtctgcagggactccgtggacttgttccgcctcctcggatccacagaaatgccgatggtccgggccaccttcttgtgaatgccggccaccctgagctcctccaggctgaagccgcggccggcgcgcaccttcgtgtggtaccgaaccgtggggcagcgcacgatgggccggatgggacccgacgcggggcgcggggcgatgcggcgcgccttggcttgccgggccttacgtctgcggatcttacgggccggctggttgaaccacgtggccacgcgccgctgccagtccttgtggaagtggggcttcaagaccatgccattccggctgggcgccatggctgcctacggccctgcggctcctggtcgacgcggccgcgaatt

SEQ ID NO: 898 - DNA, 165 bp, Homo sapiens
  misc_feature 3, 5, 40, 77, 79, 89, 96, 123: n = A,T,C or G
tancnatctgggttacccagccgttgtggcccttgagggngccacgaagggtcatctgctcagtcatggcggcggcnanagcgtgtgtngctgcancgacgaggatggcactggatggcttanagaaactagcaccacaacctctcgtcgacgcggccgcgaatt

SEQ ID NO: 899 - DNA, 67 bp, Homo sapiens
tccactagtccagtgtggtggaattcgcggccgcgtcgacgctgctgcctcacccacagcttttgat

SEQ ID NO: 900 - DNA, 77 bp, Homo sapiens
cttccaggtccagagctcccaggtttccaggttgcagtccctccagtcccagagctcccagggtttcggtttccagt

SEQ ID NO: 901 - DNA, 114 bp, Homo sapiens
gggccggggaggacggctgggggctccggggtcgcctgcacaattgcctgagcaggaggcgcaagtgggagatgacgataaagggcggggccagcgcgggccgagagtggaatt

SEQ ID NO: 902 - DNA, 64 bp, Homo sapiens
tacactactcctgaggatgctactcccgagcccggagaggacccacgcgtgacccgggccaagt

SEQ ID NO: 903 - DNA, 63 bp, Homo sapiens
tcaaaagctgtgggtgaggcaggtcgacgcggccgcgaattccaccacactggactagtggat

SEQ ID NO: 904 - DNA, 142 bp, Homo sapiens
tcctcagccagggagacagggaccaggcagcacaggcctgccagcaggaggatgccccacgagacagaagacggcattgtcgattcactgtcccaggtcaggtcgacgcggccgcgaattccaccacactggactagtggat

SEQ ID NO: 905 - DNA, 101 bp, Homo sapiens
tccactagtccagtgtggtggaattcgcggccgcgtcgacgccacctccgagagcctggatgtgatggcgtcacagaagagaccctcccagaggcacggat

SEQ ID NO: 906 - DNA, 506 bp, Homo sapiens
  misc_feature 233, 273, 302: n = A,T,C or G
gcggccgcacacacagccaggcgctaggctccctgcgggacctcgggaagggggaagagcgtcaacaatttacggagggtccagccgctgggtcagattgagacaaaccattgtgtggttgggtttgggtcagcaggctggagagggttctgttctttttgatcattatcgtttggggccccaagggagggtcttgggagccacctgagccccaaagctgggaaattcctcanagctgctcatgtcaggagccttctcactgctgctggcggnccagggtgcgtcccgcaccacaaagcctntggaaggtgccttggcctcttcgtgtgctgggggtttcatgtatacctgcagcgcctcactgtccaccacgtcagctaggtattcctcctccagattgaggatgtggtcgatggcttcctccacattctctgggagccccgtcacagtgacgcagttggggtctggggctccgctctgtgggaagcgaatgtccaccttgaatt

SEQ ID NO: 907 - DNA, 93 bp, Homo sapiens
tcccgctgcacaagttcacgtccatccgccggaccatgtcggaggttgggggctctgtggaggacctgattgccaaaggccccgtctcaaagt

SEQ ID NO: 908 - DNA, 238 bp, Homo sapiens
gggtagagaaccctgcggctgcgctttcggtgcccgcgagaggcgctggggcgcccggcaggggccgctgcgggctccgggagagggtcgaaggtgaagatctcaggaccggagccccgccggggtcccgggatggtggagggggccggggtcggggcctgcaggatggtcatggtcgggtggcagctgcgagagtgacacatggtgagccgagcggaggtcgacgcggccgcgaatt

SEQ ID NO: 909 - DNA, 190 bp, Homo sapiens
  misc_feature 25, 56, 92, 97, 125, 132, 137, 140, 149, 150, 152, 175, 181: n = A,T,C or G
gggcgtcctggtgcttaccacctgnaaactggtgaggtggtgggagaactcctggnggaccctagtggaagccttccagtaatttcttgaanctgancgctcaggtgagtagggcgacatctggnggccggntgttnaangtcattgcnnanaggaaggaagccgaggaggggancctgcngtgagggcg

SEQ ID NO: 910 - DNA, 93 bp, Homo sapiens; identical to SEQ ID NO: 907

SEQ ID NO: 911 - DNA, 261 bp, Homo sapiens
gggtccgtcagggctgaagacctgcccaggcacacaactcaccacggccggtagcccattctcgcaggtgacattcttcatggggtccagtgacacctgggggcccagcttgcagctggagatgtgggcctctgtgccggtgcagtccatggagaatggccagtagcgctgcttcctccgtgaggcaaacattttgtacactttggtattgtatgtcctctccccagggaagccaaacatgccgcagaccacgcgggaatt

SEQ ID NO: 912 - DNA, 67 bp, Homo sapiens
gcgatggagcgtgggtagggagggtccacagtgtccactcgccgtgtgcgaaggttgactcggtagt

SEQ ID NO: 913 - DNA, 545 bp, Homo sapiens
gctttctccttcttatagacgttccggacgggcatgaccggtccggtcagctgggtggccagtttcagttcttcagcagaactgtctcccttcttgggggccgagggcttcctggggaagaggatgagtttggagcggtactccttcagccgctgcacgttggcctgcagggactccgtggacttgttccgcctcctcggatccacagaaatgccgatggtccgggccaccttcttgtgaatgccggccaccctgagctcctccaggctgaagccgcggccggcgcgcaccttcgtgtggtaccgaaccgtggggcagcgcacgatgggccggatgggacccgacgcggggcgcggggcgatgcggcgcgccttggcttgccgggccttacgtctgcggatcttacgggccggctggttgaaccacgtggccacgcgccgctgccagtccttgtggaagtggggcttcaagaccatgccattccggctgggcgccatggctgcctacggccctgcggctcctgcgcgtcgacgcggccgcgaatt

SEQ ID NO: 914 - DNA, 295 bp, Homo sapiens
gctcggcatcagaccagttcctcagcttcctgaagtaaccatagcaattggacttgtggtaaaaccatccaggagcacagctgggtctcatgatgatatcacccaggactcctgttttggccaggcagctcagcaataggagcagccgcatgcttctggaagccatcttcctcctaccctgaggatgtagctagtgcaaggatctcagagaccttactagcgcttctttgaaactcctgggttctccttgatctgcaaatctgtttggcaaccaaggtcgacgcggccgcgaatt

SEQ ID NO: 915 - DNA, 391 bp, Homo sapiens
gctaaacactgtccagcgcaggggggtgctagggaggtagcgtgacaacacgatggctgcgatgcctgaagtgatgaccacgatggcggaagtgacagagaggatgttgaccacgcagtactgcagagccaccgcatcttgaggggtgcccacgtagcgcagcactgtgccatggaacagggcagctgtgatgaagctcacatggcccagcaccaccagcaccaggcctgtcttcatcagcaccttccggaagtcgcccacactcaggcctccgaggcgcagacacatgtcggctccgcgctggtcccgcccccggcttcagcgcggctcccgaggctgcgggccgccgggggaccctgctcccatcccgctgtcgacgcggccgcgaatt

SEQ ID NO: 916 - DNA, 559 bp, Homo sapiens
  misc_feature 538, 544: n = A,T,C or G
gggcgtcctggtgcttaccacctggaaactggtgaggtggtgggagaactcctggtggaccctagtggaagccttccagtaatttcttgaagctgagcgctcaggtgagtagggcgacatctggtggccggttgttgaaggtcattgcagagaggaaggaagccgaggaggggagcctgcagtgagggcgtcctggggttctccggttctcaccacccttgggccacgccgtctagtccacacctgaggagttggtcaggtagaaggggcggatgaccgtgcggaagccgttgaagtgccctgccgggcaggggaaggaggaggtgctcttcgagctgttggtgtccagggcactgggaatcgcagccttccagccctcgaaatcggtgacgtctgccacgaagagcccttcgcagagcatcagggctttgttttcgtaggcaatggtgcgatctgagccgccagacttggtgaggcccaggacagggagctcgtccgaggagcaggagaagccgtagttccagcagctctggatggnggggangtagaccagggacca

SEQ ID NO: 917 - DNA, 447 bp, Homo sapiens
  misc_feature 284, 287, 336, 360, 374, 392, 397, 400, 409: n = A,T,C or G
gctccttggcgagcacgtgaccccggcgggcacgcaggagggcaggcaggcccctgcgcaggcgctgggtggactgcttccaggtgtcatattggaagaacttgcccacggggtatctggggaagttgtccggaagcacggtcggaggggtcgacacgtccctctcggacttggcgggggtagcacagtacgtctccaggagggccaggtcacagctgcggaaacagcactcctcaacgatgccacggctgcgacggctcacacggcttgcgggcctgctgaantanaagccgcggtccccacagacgaactggagggtgtccaccagctccccgncgcacagggtctcactggggcggnaagcagcaatgcancacgaggcgaaggccaanaaggnganaagcaccancatcgacttccccattgggattcccattggtgtctgga

SEQ ID NO: 918 - DNA, 574 bp, Homo sapiens
gctccttggcgagcacgtgaccccggcgggcacgcaggagggcaggcaggcccctgcgcaggcgctgggtggactgcttccaggtgtcatattggaagaacttgcccacggggtatctggggaagttgtccggaagcacggtcggaggggtcgacacgtccctctcggacttggcgggggtagcacagtacgtctccaggagggccaggtcacagctgcggaaacagcactcctcaacgatgccacggctgcgacggctcacacggcttgcgggcctgctgaagtagaagccgcggtccccacagacgaactggagggtgtccaccagctccccgccgcacagggtctcactggggcggtaagcagcaatgcagcacgaggcgaaggccaagaaggtgagaagcaccagcatcgacttccccattgggattcccattggtgtctggaagccggcgacgctgccgcccacctccctgctgcgtgtcgcaaaccgaacagcgggcgttggccctcctgccggacactcctctgccagcgccgctctggccgagtcgcgggggccgaatgtgcgacg

SEQ ID NO: 919 - DNA, 139 bp, Homo sapiens
gccgcgctcgtcgtcgacaacggctccggcatgtgcaaggccggcttcgcgggcgacgatgccccccgggccgtcttcccctccatcgtggggcgccccaggcaccagggcgtgatggtgggcatgggtcagaaggatt

SEQ ID NO: 920 - DNA, 576 bp, Homo sapiens
  misc_feature 526, 553, 556, 571: n = A,T,C or G
ggtggacaccaccctcaagagcctgagccagcagatcgagaacatccggagcccagagggcagccgcaagaaccccgcccgcacctgccgtgacctcaagatgtgccactctgactggaagagtggagagtactggattgaccccaaccaaggctgcaacctggatgccatcaaagtcttctgcaacatggagactggtgagacctgcgtgtaccccactcagcccagtgtggcccagaagaactggtacatcagcaagaaccccaaggacaagaggcatgtctggttcggcgagagcatgaccgatggattccagttcgagtatggcggccagggctccgaccctgccgatgtggccatccagctgaccttcctgcgcctgatgtccaccgaggcctcccagaacatcacctaccactgcaagaacagcgtggcctacatggaccagcagactggcaacctcaagaaggccctgctcctccagggctccaacgagatcgagatccgcgccgagggcaacagccgnttcacctacagcgtcactgtcgatggntgnacgagtcacaccggnagcct

SEQ ID NO: 921 - DNA, 421 bp, Homo sapiens
  misc_feature 387, 408, 409, 413, 419: n = A,T,C or G
gcgcatctgcccgccctagtcggggaagagcaggaagccggagaagacgctgtcagagccctggatgcccaccatgtcgtagtagtcattgacagccagccacacctcctcgcccacctgcaacctcagcagcacaccgcccgagttgacctgattggttttggacgtgtggccacagaaggtgaccactttgacgccgctgcggtacagcagcacgcacaggttggctgtatgcgacgcgtggtagacaaagtagtagaggccggggactttgcaggtgaacttgccagtgctcgtgtcataatctccctgcgggttggtgaggaccgcgttgaatctgatcaggctgttgggtgcagggggctggtgggtctgccgagtgaccgngaacactgactggaatttctnnttgnatctgncc

SEQ ID NO: 922 - DNA, 177 bp, Homo sapiens
gacattttatgacctctcccaataggggcagaggtgagcacccctggtgaaaagttaagactcagtgagtataaatacgccaagaagagctgtggcttctttcactggtgtcctcagaaaggctgtgagcagtgttggtggcatacctgtcacagcatctagcaaagcacctgaatt

SEQ ID NO: 923 - DNA, 133 bp, Homo sapiens
tccactagtccagtgtggtggaattcgcggccgcgtcgacgcgagcagcggcggcggcgcggagagacgcagcggaggttttcctggtttcggaccccagcggccggatggtgaaatcctccctgcagcggat

SEQ ID NO: 924 - DNA, 216 bp, Homo sapiens
gggtagagaaccctgcggctgcgctttcggtgcccgcgagaggcgctggggcgcccggcaggggccgctgcgggctccgggagagggtcgaaggtgaagatctcaggaccggagccccgccggggtcccgggatggtggagggggccggggtcggggcctgcaggatggtcatggtcgggtggcagctgcgagagtgacacatggtgagccgagcg

SEQ ID NO: 925 - DNA, 649 bp, Homo sapiens
  misc_feature 441, 510, 603: n = A,T,C or G
ggcccccaattccagctgccacaccacccacggtgactgcattagttcggatgtcatacaaaagctgattgaagcaaccctctactttttggtcgtgagccttttgcttggtgcaggtttcattggctgtgttggtgacgttgtcattgcaacagaatgggggaaaggcactgttctctttgaagtagggtgagtcctcaaaatccgtatagttggtgaagccacagcacttgagccctttcatggtggtgttccacacttgagtgaagtcttcctgggaaccataatctttcttgatggcaggcactaccagcaacgtcaggaagtgctcagccattgtggtgtacaccaaggcgaccacagcagctgcaacctcagcaatgaagatgaggaggaggatgaagaagaacgtcacgagggcacacttgctctcagtcttancaccatagcagcccaggaaaccaagagcaaagaccacaacgccggctgcgatgaggaagtagcccacgntgacaaactgcatggcactggacgacagtggcccgaagatcttcagaaaggatgccccatcgattgacacccagatgcccactgccaacaggnctgcaccacacagaaagatgagcaaattgaagaggatcatcatggt

SEQ ID NO: 926 - DNA, 341 bp, Homo sapiens
gggtcctcaaactctcgaatgtacggcgcaatgccacaataaggttgattgtggtgtttttcatgtggcagtttctccaggggtggcaggtatggaatagggtcacggggggcaaagagggccagaaggttgggcggcaggaactgggtcatcttgccaagtcgcgtagcgccctcctcgctctggcgtctgtccggaggctcgcggcggctgcggcagcccctcagcaacaacaactcctgcttcggcttccactccgggggcgtccacgtccgtctgattccgtcgcccgctaagcgagcgcaccagaccgctgctcagcgtcgacgcggccgcgaatt

SEQ ID NO: 927 - DNA, 431 bp, Homo sapiens
  misc_feature 265, 298: n = A,T,C or G
gcggccgccacgctggttttgcatcttcaggagacgctcgtagccctcgcgcttctcctcggccaattcgcggaagaagtggctcacgccttccagagccacatcatcgcggtcgaaatagaagcccagagagaggtaggtgtaggaggcctgcaggtacaaattgaccaggctgttgacggctgcctccacgtcggtggaataattctgacgaatctgggagctcatggttggttggcaagaaggagctaaccacaaaaacggngctggcaggtcccagaagcaggagatggccganaagatggtcccggaggttgcaagcggagaggaaatcggagggcggtcggaggctggaagagagtccccggatctgttccgtccaaacactgttgaagcaagagacagacccgcggtcgacgcggccgcgaatt

SEQ ID NO: 928 - DNA, 538 bp, Homo sapiens
gtggcctgcaaggccgcggacagggcgagcaccgagtcgtacattttgcagctcatcatccccgtgctctgcgtgacgcagtccatccacagccccttgtacatggcctgggccgtgatgatgttgtcacccgcataggagctcatctgccactgcgggatggcggtgcaggccaccagacccacccagcccagcagggccatggagaagcccagcaactgcaggcccgaattggccatttccgccctcagaaaacactgggggcgccgggcgggagaccctacagtaaaacaaacgacacttggggggcagccccacaaaagaaaacttgaggtggagttttccggtcacccaaagagacaaaaagggtttgggccaggtgaatgcaaatcttgtcaccaaactacacacaaatcgacccctccagtgaagcgatggcctcgcggcacagggagtaggatacgccgggagggtggttccagacaaaattggtggtccccgaaggccaggcggttccctccgggcgctctcggcgacc

SEQ ID NO: 929 - DNA, 69 bp, Homo sapiens
ctcctcgaccaccagcttgcactggcagtagttgagcagcagcggcgtgatctgcttgtccagctggat

SEQ ID NO: 930 - DNA, 544 bp, Homo sapiens
gctttctccttcttatagacgttccggacgggcatgaccggtccggtcagctgggtggccagtttcagttcttcagcagaactgtctcccttcttgggggccgagggcttcctggggaagaggatgagtttggagcggtactccttcagccgctgcacgttggcctgcagggactccgtggacttgttccgcctcctcggatccacagaaatgccgatggtccgggccaccttcttgtgaatgccggccaccctgagctcctccaggctgaagccgcggccggcgcgcaccttcgtgtggtaccgaaccgtggggcagcgcacgatgggccggatgggacccgacgcggggcgcggggcgatgcggcgcgccttggcttgccgggccttacgtctgcggatcttacgggccggctggttgaaccacgtggccacgcgccgctgccagtccttgtggaagtggggcttcaagaccatgccattccggctgggcgccatggctgcctacggccctgcggctcctgcggtcgacgcggccgcgaatt

SEQ ID NO: 931 - DNA, 596 bp, Homo sapiens
  misc_feature 538: n = A,T,C or G
gttgctgcagtggcttgggcgtcaggaggctcactgagggggccacatgaccccagccagtgacagtgcagtggaggccgttggggaaggaggcgttggctgcagggaggcagatgggccggatgtagcgggagaaggtgatgggtctgctgagttggaggagtgcaatgtcgccctgggagccctcctggaggtagctggggtgggggatgatgtccttcagggtgctgaccttggcgtcctcggagtaggagtctagctggtgggcccccagcttgacctcataggcttccttgtggtgctcgctggggaagcagtgagcagctgacagcacccactgctcagacacgagagagccaccacacacatggacgccttcataggtgatgctgacctgccagggccactgaccggcgactgcactgctgccacctgtgatgcgtgcttggggggccacaccgcagggagcttctgccccttccgctcctgtccccgaccggagtaatccaagatagagcagaatggccacagcccccanctgcccaggccccaggacccccttctgggccatggcccaggacaagggcccctggggc

SEQ ID NO: 932 - DNA, 153 bp, Homo sapiens
tctgtgctggggtctgggctccgtggagagatgtgtaggggtaatgagaaattgatcagcaatgagaggtggactctgagccacctccctgaccctgaatcattcaagcgaggagcagaggagctcttgactgggggacggggatgtgaggat

SEQ ID NO: 933 - DNA, 112 bp, Homo sapiens
tcaaacttgccattgttaaaagcagccacattttggacctgcagtttcctcagaaatagttaggattctgtgtcgacgcggccgcgaattccaccacactggactagtggat

SEQ ID NO: 934 - DNA, 74 bp, Homo sapiens
gtggccatcgagtccccatcctggtcggccacccggaaacgccgctcgtcccgaggtcgacgcggccgcgaatt

SEQ ID NO: 935 - DNA, 380 bp, Homo sapiens
gcggccgccatcttggtccttttccaccattttcagcccctccagggcttggaggacccggcgggccacactcttggagcctcggctgaagtggctgggcatgacgccgtttctctgacgtcccccatagatcttggtcatggagccaaccccagcgccaccccggaggtacaggtgccgcgctgtggaagcagctcgcgtgtagaaccagttctcatcgtagggagcaagctctttgtgcttggccagcttgacggtatccacccattcggggactttcagcttcccggactttttgaggaaggctgccagagctctgacgaactcctgctggttcacgtcttttacagtaactccaggcatcgtgcggcctccgcgcg

SEQ ID NO: 936 - DNA, 155 bp, Homo sapiens
ctggcgctttgaggatggtgtcctggaccctgattacccccgaaatatctctgacggcttcgatggcatcccggacaacgtggatgcagccttggccctccctgcccatagctacagtggccgggagcgggtctacttcttcaaggggaaacagt

SEQ ID NO: 937 - DNA, 213 bp, Homo sapiens
gaggcggagaggatcatgtccgggaactgcggggtagtagcgatctgggttacccagccgttgtggcccttgagggtgccacgaagggtcatctgctcagtcatggcggcggcgagagcgtgtgtcgctgcagcgacgaggatggcactggatggcttagagaaactagcaccacaacctctcctgccgccgccgtcgacgcggccgcgaatt

SEQ ID NO: 938 - DNA, 261 bp, Homo sapiens; identical to SEQ ID NO: 911

SEQ ID NO: 939 - DNA, 228 bp, Homo sapiens
gctcaggctccaaagccagcaggaaagaggtagctcgggacgtggagccgccgcccaggtgcgccaggaccacctcggccgtcaccttagccaggtggctgcttaggtccactgtgcgcttcacgtcctcattgatcagcggcggtgcctcggaggaggcgctgcccggcgccggggcccaagtcccaagcaacaggagcagaaacaagccggcggctggcgcgtcga

SEQ ID NO: 940 - DNA, 97 bp, Homo sapiens
tccttcaagtatgcctgggtgctggacaagctgaaggcggagcgtgagcgcggcatcaccatcgacatctccctctggaagttcgagaccaccaagt

SEQ ID NO: 941 - DNA, 200 bp, Homo sapiens
ggacccaggggcacaggctcccagatgatagcccctctctgaatgagcacccaggcaacacagtccggggctgtgtgtagcaaacctgtcagcagctgcctcctgggacaaccacccccttacatgctatctatctaccagacaaatgaaagctcttcttaccccatctcccaggcaccccccagcaagggctctgaatt

SEQ ID NO: 942 - DNA, 209 bp, Homo sapiens
gaggcggagaggatcatgtccgggaactgcggggtagtagcgatctgggttacccagccgttgtggcccttgagggtgccacgaagggtcatctgctcagtcatggcggcggcgagagcgtgtgtcgctgcagcgacgaggatggcactggatggcttagagaaactagcaccacaacctctcctgccgcgtcgacgcggccgcgaatt

SEQ ID NO: 943 - DNA, 130 bp, Homo sapiens
gtaaggagcccaagaaaaagtgatgccgcctggcagactcgccatcccccaacgacacagggcaggacagcagaggacgtgctgggattaaacacattccccctcaaaaaaaaaaaaaaaaaaaaaaaaa

SEQ ID NO: 944 - DNA, 563 bp, Homo sapiens
gacagtcccagtactctttgctcagctttcggggccggcctcgtttccgcttcccgtgcttgggatcccccttcttgcagtcacgaaaaccatcgctggggaagagcttgccatcagtgggatccaggtccacgtcacttccaccggagtctgaggagtgggagctccgagaagcaccagtccctgcggtggagacgtcagagctgccgggggagggggctcctgcgccacagctgccggggtggtaggggctggcttgctgaccgtcgtccagcagctcctgggcaaaggggctgccctggtcaaagggccctgggtctagggcctcctggaaggccatgccatccttctccagcagctcaatgatccaactgagctcatcagaagagctggaagtgaggtctcgcagctgggcatggagttggtcccccagaggcccaaagaccagacgcagctcctcaagggcacaattgcagagggtggcgccatccatgtcacatcgtgagaagtcaatggcgcttgcgtcgtacttgttcttctccacttggtagctgatccagtcc

SEQ ID NO: 945 - DNA, 637 bp, Homo sapiens
  misc_feature 629: n = A,T,C or G
gctgagccccttactgctcctcccaccaatgggctccctcacacccaggacaggactaagagggagctggcggagaatggaggtgtcctgcagctggtgggcccagaggagaagatgggcctcccgggctcagactcacagaaagagctggcctgaccaccaggcacctcactggcactgctgacccatcccagaaacacaatctcagggacccgagcagctccaaggacgagaggatacagcagacacaacctaatagagagggcgcctgcagccttaacctccacggccttcgatacttatgcaagcctggtgttgctcctgtcctcagagtcatcctgcgctcatgccttttcccgaatgggttcacctctggcagttgccgcttcagtcttggccttagcctcatcttgaagtgggtagctggcgggagagggtggctgcgccccctgctggccctgaggctgcagagttgggagcaggacacctcacctgagtttcattttttttcatgtccaaaccatgcacatactatagtccagaatcaaagcacttttgaaaagtggctgcatggccatcctccagggcccaggaagttgcattccaagggcctgtttacatggcagcanaatccatc

SEQ ID NO: 946 - DNA, 306 bp, Homo sapiens
ggcgcgggctcctctcccctcggctgcccggatgcggagcaagcggctcccggggaagctggcgcgtcggccggctaccgcggcgagcacttaggaaggcgcggggtggccagttcacagctgcccgctccaagtggggggaggcgaattggagaggaggaggaggggaggaaaaagagcaaaagtgggggcgcttgcaccccttctcttctcctcctgcaaagaaaagtttccggggttgaaactggcgagtctccgcgccactgaagtttccagtcagtttcgaggtcgacgcggccgcgaatt

SEQ ID NO: 947 - DNA, 71 bp, Homo sapiens
ggtccagagctcccaggtttccaggttgcagtccctccagtcccagagctcccagggtttcggtttccagt

SEQ ID NO: 948 - DNA, 575 bp, Homo sapiens
  misc_feature 264, 344: n = A,T,C or G
gcggccgccctttttttttttttttgtcagcaaaaatctttttaataagagagtaggatccagggttagtttttgtagcctcggctggcccgtcggcctctggcacgctcgaacttccggcccttggagcggacgtagggtttggtgtggctgtgcggggttcctggggccttgccgaaatgccggtacacctctcggcccttgcgaggaccggagagcaggacagtgccacagcccttaggggagtccagggccagctggtcnaaagtgaggatcttgccccctgccctgaggatgcggctgcgggcccggctggtcacgcgcagtgcacataccttcagttngggtacctcctgaacccgcacatcatcagttatggtccccacaaccacggccgtcttgttttcccggccaggaagcttcatcttccggatcatccgggaaagggacagaggcggccggttggtgcgactcataaacaacctcttcaacacaacctggttgaatgtggagttggttcttctggccagaaacctgtataacttgaccaacagcctcaggtagatatcctggct

SEQ ID NO: 949 - DNA, 294 bp, Homo sapiens
ggggtttccacgtagcccacaatgcccacaaccaccatgggtggtgtctctacaatggtcacagcctccaccacctccttcttgttcaccttggatcccggcctgtcgacttcccgcacgatgtgagtcatgccagccttgtatcccaggaaggctgtgaggtggaccggcttggacgggtcatccttagggaagctcttcaccttcccacgatgcctgctgctgcgcttccgaggcaggaagccgagggacccatgtctgggagcggagaactttctgtgagacatcacgcca

SEQ ID NO: 950 - DNA, 693 bp, Homo sapiens
  misc_feature 556, 676: n = A,T,C or G
ggcccccaattccagctgccacaccacccacggtgactgcattagttcggatgtcatacaaaagctgattgaagcaaccctctactttttggtcgtgagccttttgcttggtgcaggtttcattggctgtgttggtgacgttgtcattgcaacagaatgggggaaaggcactgttctctttgaagtagggtgagtcctcaaaatccgtatagttggtgaagccacagcacttgagccctttcatggtggtgttccacacttgagtgaagtcttcctgggaaccataatctttcttgatggcaggcactaccagcaacgtcaggaagtgctcagccattgtggtgtacaccaaggcgaccacagcagctgcaacctcagcaatgaagatgaggaggaggatgaagaagaacgtcacgagggcacacttgctctcagtcttagcaccatagcagcccaggaaaccaagagcaaagaccacaacgccggctgcgatgaggaagtagcccacgttgacaaactgcatggcactggacgacagtggcccgaagatcttcanaaaggatgccccatcgattgacacccagatgcccactgccaacagggctgcaccacacagaaagatgagcaaattgaagaggatcatcatggtcttaatgaagctgaagcactgcatggnggctcctgttcagggct

SEQ ID NO: 951 - DNA, 607 bp, Homo sapiens
gtggcctgcaaggccgcggacagggcgagcaccgagtcgtacattttgcagctcatcatccccgtgctctgcgtgacgcagtccatccacagccccttgtacatggcctgggccgtgatgatgttgtcacccgcataggagctcatctgccactgcgggatggcggtgcaggccaccagacccacccagcccagcagggccatggagaagcccagcaactgcaggcccgaattggccatttccgccctcagaaaacactgggggcgccgggcgggagaccctacagtaaaacaaacgacacttggggggcagccccacaaaagaaaacttgaggtggagttttccggtcacccaaagagacaaaaagggtttgggccaggtgaatgcaaatcttgtcaccaaactacacacaaatcgacccctccagtgaagcgatggcctcgcggcacagggagtaggatacgccgggagggtggttccagacaaaattggtggtccccgaaggccaggcggttccctccgggcgctctcggcgaccctaggcaaacaaaaggtggaggggccgtctgggcgcgtttctgagcgccggcaagtcccaaagtatcct

SEQ ID NO: 952 - DNA, 372 bp, Homo sapiens
ggatgaggtcaacccgaaggggtttcttgagaagcagtgacttcttctggactttggttctcttctttgtcagccctttttccttggagccagtgtccacgaagaagagtttttcatttggggcctctgacaacaagccaccgctcgtgcgctcctgtagccgcacgtcttccaggaactggtcaacctccagccccagcggctcctgagcaagccgccgccagccccgcttcttatttcttgggcctcgccgccgccgcctcagcgctgggtccaccgaagtgggccgcagccccaggaaaccagaatcggcatcgcttttcgagctgcgcttcccaccaacgccactgcctgtcgacgcggccgcgaatt

SEQ ID NO: 953 - DNA, 275 bp, Homo sapiens
gccatctgctgttttttctcagcaccttccgtcttttgttcaatacttgagacgaccctccaagatgacctacgggctcctacaacatttttataagcaactgagagaagattcctctcctcattggataattcagctccttgctcagttacagacttcatgcaggctgccatgtcatcatatcgctcagcctgctcggccagtttggccttctgaaccagctcatttttatccatgactggatgttctgtgtccggtcgacgcggccgcgaatt

SEQ ID NO: 954 - DNA, 189 bp, Homo sapiens
ggctcccacttccctgcttcgatggagaaggcgaggtggtccagcaggtgccgtaggtccctgacccagctgaccaccaccctgggccagcttctgacagtcccacctcccagttgctggaggggtagtggcctcacagacggccctcctctagatgcagtgggcccagagtcgacgcggccgcgaatt

SEQ ID NO: 955 - DNA, 189 bp, Homo sapiens
gaggcggagaggatcatgtccgggaactgcggggtagtagcgatctgggttacccagccgttgtggcccttgagggtgccacgaagggtcatctgctcagtcatggcggcggcgagagcgtgtgtcgctgcagcgacgaggatggcactggatggcttagagaaactagcgtcgacgcggccgcgaatt

SEQ ID NO: 956 - DNA, 216 bp, Homo sapiens
gcggccgcacgtgtaggcaaagaagcctgtgtccggcctccagaccatgttggcccgcccattcccgctgtaaccgacgacagccttcagacgcagccacccaccgctggcgggaggcgggcaagtgcccttggcagagtgggggctgcagctgaccctggcaggcgtgaaggccttgcaggaagccaggtaggtggtgcgtggggcccccgaatt

SEQ ID NO: 957 - DNA, 62 bp, Homo sapiens
ccagtgggaggctcccaccctggtagatgaacagcccctggagaactacctggatatggagt

SEQ ID NO: 958 - DNA, 199 bp, Homo sapiens
ggattcggtcatattggaattgctgttcctgatgtatacagtgcttgtaaaaggtttgaagaactgggagtcaaatttgtgaagaaacctgatgatggtaaaatgaaaggcctggcatttattcaagatcctgatggctactggattgaaattttgaatcctaacaaaatggcaaccttaatgtagtgctgtgagaatt

SEQ ID NO: 959 - DNA, 212 bp, Homo sapiens
gaggcggagaggatcatgtccgggaactgcggggtagtagcgatctgggttacccagccgttgtggcccttgagggtgccacgaagggtcatctgctcagtcatggcggcggcgagagcgtgtgtcgctgcagcgacgaggatggcactggatggcttagagaaactagcaccacaacctctcctgccgccgcgtcgacgcggccgcgaatt

SEQ ID NO: 960 - DNA, 177 bp, Homo sapiens
  misc_feature 79: n = A,T,C or G
gacattttatgacctctcccaataggggcagaggtgagcacccctggtgaaaagttaagactcagtgagtataaatacnccaagaagagctgtggcttctttcactggtgtcctcagaaaggctgtgagcagtgttggtggcatacctgtcacagcatctagcaaagcacctgaatt

SEQ ID NO: 961 - DNA, 490 bp, Homo sapiens
  misc_feature 203, 296: n = A,T,C or G
gggcgtcctggtgcttaccacctggaaactggtgaggtggtgggagaactcctggtggaccctagtggaagccttccagtaatttcttgaagctgagcgctcaggtgagtagggcgacatctggtggccggttgttgaaggtcattgcagagaggaaggaagccgaggaggggagcctgcagtgagggcgtcctggggttctncggttctcaccacccttgggccacgccgtctagtccacacctgaggagttggtcaggtagaaggggcggatgaccgtgcggaagccgttgaantgccctgccgggcaggggaaggaggaggtgctcttcgagctgttggtgtccagggcactgggaatcgcagccttccagccctcgaaatcggtgacgtctgccacgaagagcccttcgcagagcatcagggctttgttttcgtaggcaatggtgcgatctgagccgccagacttggtgaggcccaggacagggag

SEQ ID NO: 962 - DNA, 159 bp, Homo sapiens
  misc_feature 53, 80, 82, 90: n = A,T,C or G
gggtcggcccgggtggttgcggccacagcgcagcggcggagagcggcgcccancatgacggcgatggcggcgcgcgggcngnggacaganagaagccggtgtaagctcgcgggttgctccggagcgggcgggggccggacgtcgacgcggccgcgaatt

SEQ ID NO: 963 - DNA, 217 bp, Homo sapiens
  misc_feature 79, 80: n = A,T,C or G
gggtagagaaccctgcggctgcgctttcggtgcccgcgagaggcgctggggcgcccggcaggggccgctgcgggctccnngagagggtcgaaggtgaagatctcaggaccggagccccgccggggtcccgggatggtggagggggccggggtcggggcctgcaggatggtcatggtcgggtggcagctgcgagagtgacacatggtgagccgagcgt

SEQ ID NO: 964 - DNA, 540 bp, Homo sapiens
  misc_feature 484: n = A,T,C or G
gtggcctgcaaggccgcggacagggcgagcaccgagtcgtacattttgcagctcatcatccccgtgctctgcgtgacgcagtccatccacagccccttgtacatggcctgggccgtgatgatgttgtcacccgcataggagctcatctgccactgcgggatggcggtgcaggccaccagacccacccagcccagcagggccatggagaagcccagcaactgcaggcccgaattggccatttccgccctcagaaaacactgggggcgccgggcgggagaccctacagtaaaacaaacgacacttggggggcagccccacaaaagaaaacttgaggtggagttttccggtcacccaaagagacaaaaagggtttgggccaggtgaatgcaaatcttgtcaccaaactacacacaaatcgacccctccagtgaagcgatggcctcgcggcacagggagtaggatacgccgggagggtggttccaganaaaattggtggtccccgaaggccaggcggttccctccgggcgctctcggcgaccct

SEQ ID NO: 965 - DNA, 321 bp, Homo sapiens
  misc_feature 299, 307: n = A,T,C or G
gcccacagtggcttgtttccgcagtgcgcggccgtcagcacccaactctggtccaccaggacacccgcgcagtggaacgagaggccgttgaagagcgagacctgccagggctgcgagccgcgcgcgcacggggcgccataggcttcggggtccaagcgcgtgtcgttttgggggagcagcgccgcctctgcggcccagagttgcgccatcagcagcggcagcagcttcgccagagcccgggcgccagaggcggcggagaggtggaggtgcggagctctcatggccaggatctgggagtngccgatangaaggagggagggg

SEQ ID NO: 966 - DNA, 642 bp, Homo sapiens
  misc_feature 238: n = A,T,C or G
ggtggacaccaccctcaagagcctgagccagcagatcgagaacatccggagcccagagggcagccgcaagaaccccgcccgcacctgccgtgacctcaagatgtgccactctgactggaagagtggagagtactggattgaccccaaccaaggctgcaacctggatgccatcaaagtcttctgcaacatggagactggtgagacctgcgtgtaccccactcagcccagtgtggcccanaagaactggtacatcagcaagaaccccaaggacaagaggcatgtctggttcggcgagagcatgaccgatggattccagttcgagtatggcggccagggctccgaccctgccgatgtggccatccagctgaccttcctgcgcctgatgtccaccgaggcctcccagaacatcacctaccactgcaagaacagcgtggcctacatggaccagcagactggcaacctcaagaaggccctgctcctccagggctccaacgagatcgagatccgcgccgagggcaacagccgcttcacctacagcgtcactgtcgatggctgcacgagtcacaccggagcctggggcaagacagtgattgaatacaaaaccaccaagacctcccgcctgcccatcatcgatgtggcccc

SEQ ID NO: 967 - DNA, 650 bp, Homo sapiens
  misc_feature 571: n = A,T,C or G
ggtggacaccaccctcaagagcctgagccagcagatcgagaacatccggagcccagagggcagccgcaagaaccccgcccgcacctgccgtgacctcaagatgtgccactctgactggaagagtggagagtactggattgaccccaaccaaggctgcaacctggatgccatcaaagtcttctgcaacatggagactggtgagacctgcgtgtaccccactcagcccagtgtggcccagaagaactggtacatcagcaagaaccccaaggacaagaggcatgtctggttcggcgagagcatgaccgatggattccagttcgagtatggcggccagggctccgaccctgccgatgtggccatccagctgaccttcctgcgcctgatgtccaccgaggcctcccagaacatcacctaccactgcaagaacagcgtggcctacatggaccagcagactggcaacctcaagaaggccctgctcctccagggctccaacgagatcgagatccgcgccgagggcaacagccgcttcacctacagcgtcactgtcgatggctgcacgagtcacaccggnagcctggggcaagacagtgattgaatacaaaaccaccaagaccttccgcctgcccatcatcgatgtggcccccttggac

SEQ ID NO: 968 - DNA, 629 bp, Homo sapiens
  misc_feature 571: n = A,T,C or G
ggtggacaccaccctcaagagcctgagccagcagatcgagaacatccggagcccagagggcagccgcaagaaccccgcccgcacctgccgtgacctcaagatgtgccactctgactggaagagtggagagtactggattgaccccaaccaaggctgcaacctggatgccatcaaagtcttctgcaacatggagactggtgagacctgcgtgtaccccactcagcccagtgtggcccagaagaactggtacatcagcaagaaccccaaggacaagaggcatgtctggttcggcgagagcatgaccgatggattccagttcgagtatggcggccagggctccgaccctgccgatgtggccatccagctgaccttcctgcgcctgatgtccaccgaggcctcccagaacatcacctaccactgcaagaacagcgtggcctacatggaccagcagactggcaacctcaagaaggccctgctcctccagggctccaacgagatcgagatccgcgccgagggcaacagccgcttcacctacagcgtcactgtcgatggctgcacgagtcacaccggnagcctggggcaagacagtgattgaatacaaaaccaccaagacctcccgcctgcccatc

SEQ ID NO: 969 - DNA, 222 bp, Homo sapiens
gaatgtcaggggtgttgggggctttggctgggtcctgggtcttcgtgtagagacctggaggcgcttggttcttggggttctccaggattccagcctcgtagctgatgtgcatgaggttctcatccatgctccacgggttcttgggagtgaccgggatgggaatcccgtgttgctttgcgtactccatcaggtcattgcggcccttgaaccggttgtagaatt

SEQ ID NO: 970 - DNA, 79 bp, Homo sapiens
gcaggggccgcctggccttgctccgctccacgaggaggccgccaaccgcagggccgcgacacggacgggaagcaacgga

SEQ ID NO: 971 - DNA, 111 bp, Homo sapiens
ggaaaatgcatctaccccacccaaccagcagcctcactttaggctgccttgtcccgggcgccccattcgtcagccccacgcctcctccaggatccgggcccagctcgaatt

SEQ ID NO: 972 - DNA, 609 bp, Homo sapiens
  misc_feature 571: n = A,T,C or G
ggtggacaccaccctcaagagcctgagccagcagatcgagaacatccggagcccagagggcagccgcaagaaccccgcccgcacctgccgtgacctcaagatgtgccactctgactggaagagtggagagtactggattgaccccaaccaaggctgcaacctggatgccatcaaagtcttctgcaacatggagactggtgagacctgcgtgtaccccactcagcccagtgtggcccagaagaactggtacatcagcaagaaccccaaggacaagaggcatgtctggttcggcgagagcatgaccgatggattccagttcgagtatggcggccagggctccgaccctgccgatgtggccatccagctgaccttcctgcgcctgatgtccaccgaggcctcccagaacatcacctaccactgcaagaacagcgtggcctacatggaccagcagactggcaacctcaagaaggccctgctcctccagggctccaacgagatcgagatccgcgccgagggcaacagccgcttcacctacagcgtcactgtcgatggctgcacgagtcacaccggnagcctggggcaagacagtgattgaatacaaaaccacca

SEQ ID NO: 973 - DNA, 311 bp, Homo sapiens
ggggtttccacgtagcccacaatgcccacaaccaccatgggtggtgtctctacaatggtcacagcctccaccacctccttcttgttcaccttggatcccggcctgtcgacttcccgcacgatgtgagtcatgccagccttgtatcccaggaaggctgtgaggtggaccggcttggacgggtcatccttagggaagctcttcaccttcccacgatgcctgctgctgcgcttccgaggcaggaagccgagggacccatgtctgggagcggagaactttctgtgagacatcacgcgtcgacgcggccgcgaatt

SEQ ID NO: 974 - DNA, 180 bp, Homo sapiens
  misc_feature 114, 127, 133, 138, 162: n = A,T,C or G
gaggcggagaggatcatgtccgggaactgcggggtagtagcgatctgggttacccagccgttgtggcccttgagggtgccacgaagggtcatctgctcagtcatggcggcggcnagagcgtgtgtcnctgcancgacnaggatggcactggatggcttaganaaactagcaccacgtcga

SEQ ID NO: 975 - DNA, 187 bp, Homo sapiens
gcaccagccccggggactatgtgctcagcgtctcagagaactcgcgcgtctcccactacatcatcaacagcagcggcccgcgcccgccggtgccaccgtcgcccgcccagcctccgcccggggtgagcccctccagactccgaataggagatcaagagtttgattcattgcctgctttactggaatt

SEQ ID NO: 976 - DNA, 59 bp, Homo sapiens
ctggttccgctgcatggacctggacggggacggcgccctgtccatgttcgagctcgagt

SEQ ID NO: 977 - DNA, 66 bp, Homo sapiens
ggtccagagctcccaggtttccaggttgcagtccctccagtcccagagctcccagggtttcggttt

SEQ ID NO: 978 - DNA, 114 bp, Homo sapiens
ggagctgatgcgggaaccgggcccactcgtgtaggagcggctgctgaaggcccgggggccagaggtggacaccttgtaggacttctgggtcacccgtcgacgcggccgcgaatt

SEQ ID NO: 979 - DNA, 177 bp, Homo sapiens; identical to SEQ ID NO: 922

SEQ ID NO: 980 - DNA, 188 bp, Homo sapiens
  misc_feature 41: n = A,T,C or G
ggagctgatgcgggaaccgggcccactcgtgtaggagcggntgctgaaggcccgggggccagaggtggacaccttgtaggacttctgggtcaccctgatggacatggtagaggctggagtggaggcaggcgggccgaaccaggcggagatcctagaaggagcggagaaggtcgacgcggccgcgaatt

SEQ ID NO: 981 - DNA, 184 bp, Homo sapiens
  misc_feature 91: n = A,T,C or G
gggccccaggaggccgggtgggcacaggccatggcgagggtggggcacaagagccccagaccccggcggctttgcactgatgggctgcggntgggcacaggccatagtgaggggggcatgagagccccagaccgggcggctttgcactgatgagctgcagggcaggtcgacgcggccgcgaatt

SEQ ID NO: 982 - DNA, 98 bp, Homo sapiens
tccactagtccagtgtggtggaattcgcggccgcgtcgaccgaaccctgaaccctacggtcccgacccgcgggcgaggccgggtacctgggctgggat

SEQ ID NO: 983 - DNA, 425 bp, Homo sapiens
  misc_feature 165: n = A,T,C or G
gccggatatggtcctgccggtggcagcctatgggctgatcctgatggccatgctgtggcgcggcctggcccagggcgggagtgccggctggggcgcgctgctcttcacgctctctgatggcgtgctggcctgggacaccttcgcccagcccctgccccatgcccncctggtgatcatgaccacctactatgctgcccagctcctcatcacactgtcagccctcaggagcccggtgcccaagactgactgactagggagcttgaagggccggtgttcaggccctctcctcctgcaaggacctgggcctcccagcccagcccagcctgagaaataccctcagcagcgaagcttcctgacgcctgtctgcaggcgccgctgccgccgtcgcttctggctgaagacgtttgaggacgatttgcggaatt

SEQ ID NO: 984 - DNA, 148 bp, Homo sapiens
  misc_feature 5: n = A,T,C or G
tcctnagccagggagacagggaccaggcagcacaggcctgccagcaggaggatgccccacgagacagaagacggcattgtcgattcactgtcccaggtcagtggtgggtcgacgcggccgcgaattccaccacactggactagtggat

SEQ ID NO: 985 - DNA, 461 bp, Homo sapiens
  misc_feature 238, 255, 403, 448, 451: n = A,T,C or G
ggtggacaccaccctcaagagcctgagccagcagatcgagaacatccggagcccagagggcagccgcaagaaccccgcccgcacctgccgtgacctcaagatgtgccactctgactggaagagtggagagtactggattgaccccaaccaaggctgcaacctggatgccatcaaagtcttctgcaacatggagactggtgagacctgcgtgtaccccactcagcccagtgtggcccanaagaactggtacatcancaagaaccccaaggacaagaggcatgtctggttcggcgagagcatgaccgatggattccagttcgagtatggcggccagggctccgaccctgccgatgtggccatccagctgaccttcctgcgcctgatgtccaccgaggcctcccanaacatcacctaccactgcaagaacagcgtggcctacatggaccancanactggcaacc

SEQ ID NO: 986 - DNA, 138 bp, Homo sapiens
  misc_feature 45, 137: n = A,T,C or G
gagcggctgctgaaggcccgggggccagaggtggacaccttgtangacttctgggtcaccctgatggacatggtagaggcaggagtggaggcaggcgggccgaaccaggcggagatcctagaaggagcggaggtcgnc

SEQ ID NO: 987 - DNA, 555 bp, Homo sapiens
  misc_feature 423: n = A,T,C or G
gcggccgcccttttttttttttttttttagtggtataactatatttattgtgcctgagaggcaaggtgagggaaaaatctcaacagaagcaagtttggggaaaatctggagtccccagtaaaaagcaggaaggtctctgctgtactcatcacagaatgggagagagggctctcaatagatcattccctttgtttctcccctgggcttcttgagcttctcgaagttcttcaggatgatgtcatataacacagcataagcattgcggatctccatgaccatcagccggatgtcccggtactctgcctcatccagctcgtgcaccagctgccgataatcacccacatggggctgcttggctgctttagtcactgcatcaccacgctcagagaaatacttagagatttgagtgtggaagccttctancttggtgtggaggctggtcatcagctcaaacaccttctcctggacagccactccaaaattgttaccatcctcaatccgaggtatctgcagctgcaaccaggtggtgaccaggttgagctgctcaatgacatc

SEQ ID NO: 988 - DNA, 318 bp, Homo sapiens
gacggcgcgggcgacctacgaacagctttgaggaagccccgacagtggcggcgtccagtgcctccgagggcggcgaccgcggctccgcagcctctcccagccgctccgcccggttccggggagtcggtcgggacaaaatggcctcccctcccccctcagggcttctcggccgggacgctcccacgggcgagcaagcctgctctgccgtcgaggaggcgcagcgggcgtgaggacagtctctctcccgagcggaaactccctgctagcacgcggcgagggcagcgaagaaggacccctaagtcgacgagctcagttaca

SEQ ID NO: 989 - DNA, 177 bp, Homo sapiens; identical to SEQ ID NO: 922

SEQ ID NO: 990 - DNA, 144 bp, Homo sapiens
  misc_feature 11: n = A,T,C or G
gtgagcacccntggtgaaaagttaagactcagtgagtataaatacgccaagaagagctgtggcttctttcactggtgtcctcagaaaggctgtgagcagtgttggtggcatacctgtcacagcatctagcaaagcacctgaatt

SEQ ID NO: 991 - DNA, 659 bp, Homo sapiens
ggtggacaccaccctcaagagcctgagccagcagatcgagaacatccggagcccagagggcagccgcaagaaccccgcccgcacctgccgtgacctcaagatgtgccactctgactggaagagtggagagtactggattgaccccaaccaaggctgcaacctggatgccatcaaagtcttctgcaacatggagactggtgagacctgcgtgtaccccactcagcccagtgtggcccagaagaactggtacatcagcaagaaccccaaggacaagaggcatgtctggttcggcgagagcatgaccgatggattccagttcgagtatggcggccagggctccgaccctgccgatgtggccatccagctgaccttcctgcgcctgatgtccaccgaggcctcccagaacatcacctaccactgcaagaacagcgtggcctacatggaccagcagactggcaacctcaagaaggccctgctcctccagggctccaacgagatcgagatccgcgccgagggcaacagccgcttcacctacagcgtcactgtcgatggctgcacgagtcacaccggagcctggggcaagacagtgattgaatacaaaaccaccaagacctcccgcctgcccatcatcgatgtggcccccttggacgttggtgccc

SEQ ID NO: 992 - DNA, 226 bp, Homo sapiens
tccgctgcactgggtttgccggattcttgggcttcccacatactgcttcacattcaggaagtttatctccaacagccttatttatccactgcttcttatcatttaaggtgtatactccatctccttctgtgcgcagtttgtagtagttcttacactggtagcgaaccgagtgctccacatagccatgtgcaatctcggggggcttcgggcagccgtcatctgcgat

SEQ ID NO: 993 - DNA, 160 bp, Homo sapiens
  misc_feature 8, 9, 15, 37, 41, 85, 87: n = A,T,C or G
ctcgtgtnngagcgnctgctgaaggcccgggggccanaggnggacaccttgtacgacttctgggtcaccctgatggacatggtanangctggagtggaggcaggcgggccgaaccaggcggagatcctagaaggagcggaggtcgacgcggccgcgaatt

SEQ ID NO: 994 - DNA, 622 bp, Homo sapiens
  misc_feature 1, 9: n = A,T,C or G
nagcctganccagcagatcgagaacatccggagcccagagggcagccgcaagaaccccgcccgcacctgccgtgacctcaagatgtgccactctgactggaagagtggagagtactggattgaccccaaccaaggctgcaacctggatgccatcaaagtcttctgcaacatggagactggtgagacctgcgtgtaccccactcagcccagtgtggcccagaagaactggtacatcagcaagaaccccaaggacaagaggcatgtctggttcggcgagagcatgaccgatggattccagttcgagtatggcggccagggctccgaccctgccgatgtggccatccagctgaccttcctgcgcctgatgtccaccgaggcctcccagaacatcacctaccactgcaagaacagcgtggcctacatggaccagcagactggcaacctcaagaaggccctgctcctccagggctccaacgagatcgagatccgcgccgagggcaacagccgcttcacctacagcgtcactgtcgatggctgcacgagtcacaccggagcctggggcaagacagtgattgaatacaaaaccaccaagacctcccgcctgcccatcatcgatgtggcc

SEQ ID NO: 995 - DNA, 158 bp, Homo sapiens
aataagattttgccagaggggaaggctcgattgtgctgttaataacttaataatgacaaaataatgaggtgtatatgctttacatgcaatgttatatagtgaattgttctgattcttaattgtaagtctggtttttttatctgtaagataattgtgtg

SEQ ID NO: 996 - DNA, 295 bp, Homo sapiens
cggccgcgtcgactctcggagcggagacggcaaatggcggacttcgacacctacgacgatcgggcctacagcagcttcggcggcggcagagggtcccgcggcagtgctggtggccatggttcccgtagccagaaggagttgcccacagagcccccctacacagcatacgtaggaaatctacctttcaatacggttcagggcgacatagatgctatctttaaggatctcagcataaggagtgtacggctagtcagagacaaagacacagataaatttaaaggattctgctatgtag

SEQ ID NO: 997 - DNA, 125 bp, Homo sapiens
cggccgccctttttttttttttttttaaggttttttggctgtaagtttattcaatgcaaaagaatcctctccaattttactgaggtggctgaccacgtccacgaccaaatccgcctctaaactgg

SEQ ID NO: 998 - DNA, 152 bp, Homo sapiens
gagctgatgcgggaaccgggcccactcgtgtaggagcggctgctgaaggcccgggggccagaggtggacaccttgtaggacttctgggtcaccctgatggacatggtagaggctggagtggaggcaggcgggccgaaccaggcggagatcct

SEQ ID NO: 999 - DNA, 119 bp, Homo sapiens
  misc_feature 23, 29, 54, 76, 77: n = A,T,C or G
taaagcaaccactaaaccacctncagcangagaaagcagcagagagctcttcanacagctcagactctgacagctnngaggatgatgaagctccttctaagccagctggtaccaccaag

SEQ ID NO: 1000 - DNA, 209 bp, Homo sapiens
  misc_feature 6, 7: n = A,T,C or G
ccctcnngaggcggagaggatcatgtccgggaactgcggggtagtagcgatctgggttacccagccgttgtggcccttgagggtgccacgaagggtcatctgctcagtcatggcggcggcgagagcgtgtgtcgctgcagcgacgaggatggcactggatggcttagagaaactagcaccacaacctctcctgcgtcgacgcggccgcg

SEQ ID NO: 1001 - DNA, 390 bp, Homo sapiens
gtggacaccaccctcaagagcctgagccagcagatcgagaacatccggagcccagagggcagccgcaagaaccccgcccgcacctgccgtgacctcaagatgtgccactctgactggaagagtggagagtactggattgaccccaaccaaggctgcaacctggatgccatcaaagtcttctgcaacatggagactggtgagacctgcgtgtaccccactcagcccagtgtggcccagaagaactggtacatcagcaagaaccccaaggacaagaggcatgtctggttcggcgagagcatgaccgatggattccagttcgagtatggcggccagggctccgaccctgccgatgtggccatccagctgaccttcctgcgcctgatgtccacc

SEQ ID NO: 1002 - DNA, 613 bp, Homo sapiens
gtggacaccaccctcaagagcctgagccagcagatcgagaacatccggagcccagagggcagccgcaagaaccccgcccgcacctgccgtgacctcaagatgtgccactctgactggaagagtggagagtactggattgaccccaaccaaggctgcaacctggatgccatcaaagtcttctgcaacatggagactggtgagacctgcgtgtaccccactcagcccagtgtggcccagaagaactggtacatcagcaagaaccccaaggacaagaggcatgtctggttcggcgagagcatgaccgatggattccagttcgagtatggcggccagggctccgaccctgccgatgtggccatccagctgaccttcctgcgcctgatgtccaccgaggcctcccagaacatcacctaccactgcaagaacagcgtggcctacatggaccagcagactggcaacctcaagaaggccctgctcctccagggctccaacgagatcgagatccgcgccgagggcaacagccgcttcacctacagcgtcactgtcgatggctgcacgagtcacaccggagcctggggcaagacagtgattgaatacaaaaccaccaagacct

SEQ ID NO: 1003 - DNA, 639 bp, Homo sapiens
gtggacaccaccctcaagagcctgagccagcagatcgagaacatccggagcccagagggcagccgcaagaaccccgcccgcacctgccgtgacctcaagatgtgccactctgactggaagagtggagagtactggattgaccccaaccaaggctgcaacctggatgccatcaaagtcttctgcaacatggagactggtgagacctgcgtgtaccccactcagcccagtgtggcccagaagaactggtacatcagcaagaaccccaaggacaagaggcatgtctggttcggcgagagcatgaccgatggattccagttcgagtatggcggccagggctccgaccctgccgatgtggccatccagctgaccttcctgcgcctgatgtccaccgaggcctcccagaacatcacctaccactgcaagaacagcgtggcctacatggaccagcagactggcaacctcaagaaggccctgctcctccagggctccaacgagatcgagatccgcgccgagggcaacagccgcttcacctacagcgtcactgtcgatggctgcacgagtcacaccggagcctggggcaagacagtgattgaatacaaaaccaccaagacctcccgcctgcccatcatcgatgtggcc

SEQ ID NO: 1004 - DNA, 85 bp, Homo sapiens
ccgttattcgtcgtggctcaagcccggccacgccgccccaagggctcctcccgacctcccggcctgccgctccggccactgcggg

SEQ ID NO: 1005 - DNA, 636 bp, Homo sapiens
gtggacaccaccctcaagagcctgagccagcagatcgagaacatccggagcccagagggcagccgcaagaaccccgcccgcacctgccgtgacctcaagatgtgccactctgactggaagagtggagagtactggattgaccccaaccaaggctgcaacctggatgccatcaaagtcttctgcaacatggagactggtgagacctgcgtgtaccccactcagcccagtgtggcccagaagaactggtacatcagcaagaaccccaaggacaagaggcatgtctggttcggcgagagcatgaccgatggattccagttcgagtatggcggccagggctccgaccctgccgatgtggccatccagctgaccttcctgcgcctgatgtccaccgaggcctcccagaacatcacctaccactgcaagaacagcgtggcctacatggaccagcagactggcaacctcaagaaggccctgctcctccagggctccaacgagatcgagatccgcgccgagggcaacagccgcttcacctacagcgtcactgtcgatggctgcacgagtcacaccggagcctggggcaagacagtgattgaatacaaaaccaccaagacctcccgcctgcccatcatcgatgtg

SEQ ID NO: 1006 - DNA, 629 bp, Homo sapiens
  misc_feature 468: n = A,T,C or G
gtggacaccaccctcaagagcctgagccagcagatcgagaacatccggagcccagagggcagccgcaagaaccccgcccgcacctgccgtgacctcaagatgtgccactctgactggaagagtggagagtactggattgaccccaaccaaggctgcaacctggatgccatcaaagtcttctgcaacatggagactggtgagacctgcgtgtaccccactcagcccagtgtggcccagaagaactggtacatcagcaagaaccccaaggacaagaggcatgtctggttcggcgagagcatgaccgatggattccagttcgagtatggcggccagggctccgaccctgccgatgtggccatccagctgaccttcctgcgcctgatgtccaccgaggcctcccagaacatcacctaccactgcaagaacagcgtggcctacatggaccagcagactggcaacctcaagaangccctgctcctccagggctccaacgagatcgagatccgcgccgagggcaacagccgcttcacctacagcgtcactgtcgatggctgcacgagtcacaccggagcctggggcaagacagtgattgaatacaaaaccaccaagacctcccgcctgcccatcat

SEQ ID NO: 1007 - DNA, 575 bp, Homo sapiens
  misc_feature 248, 372: n = A,T,C or G
gtggacaccaccctcaagagcctgagccagcagatcgagaacatccggagcccagagggcagccgcaagaaccccgcccgcacctgccgtgacctcaagatgtgccactctgactggaagagtggagagtactggattgaccccaaccaaggctgcaacctggatgccatcaaagtcttctgcaacatggagactggtgagacctgcgtgtaccccactcagcccagtgtggcccagaagaactggtncatcagcaagaaccccaaggacaagaggcatgtctggttcggcgagagcatgaccgatggattccagttcgagtatggcggccagggctccgaccctgccgatgtggccatccagctgaccttnctgcgcctgatgtccaccgaggcctcccagaacatcacctaccactgcaagaacagcgtggcctacatggaccagcagactggcaacctcaagaaggccctgctcctccagggctccaacgagatcgagatccgcgccgagggcaacagccgcttcacctacagcgtcactgtcgatggctgcacgagtcacaccggagcctg

SEQ ID NO: 1008 - DNA, 62 bp, Homo sapiens; identical to SEQ ID NO: 843

SEQ ID NO: 1009 - DNA, 180 bp, Homo sapiens
  misc_feature 154: n = A,T,C or G
gagctgatgcgggaaccgggcccactcgtgtaggagcggctgctgaaggcccgggggccagaggtggacaccttgtaggacttctgggtcaccctgatggacatggtagaggcaggagtggaggcaggcgggccgaaccaggcggagatcctanaaggagcggaggtcgacgcggccgcg

SEQ ID NO: 1010 - DNA, 169 bp, Homo sapiens
gaggcggcacaggtcacgcatggccagcacggcagccatggcgctgcgctcgctcatgtttctcgccaggtaggtctgggccaggttcttgagtttgaagctgctggccccgggcacacgctcccggatgagaggcagggcagccaggaagcccgagatggcctcctgg

SEQ ID NO: 1011 - DNA, 170 bp, Homo sapiens
  misc_feature 78, 79: n = A,T,C or G
gagctgatgcgggaaccgggcccactcgtgtaggagcggctgctgaaggcccgggggccagaggtggacaccttgtannacttctgggtcaccctgatggacatggtagaggctggagtggaggcaggcgggccgaaccaggcggagatcctagaaggagcggaggtcga

SEQ ID NO: 1012 - DNA, 344 bp, Homo sapiens
  misc_feature 231, 235, 238, 245, 246, 251, 255, 263, 264, 270, 276, 302,313, 316, 317, 325: n = A,T,C or G
gtggacaccaccctcaagagcctgagccagcagatcgagaacatccggagcccagagggcagccgcaagaaccccgcccgcacctgccgtgacctcaagatgtgccactctgactggaagagtggagagtactggattgaccccaaccaaggctgcaacctggatgccatcaaagtcttctgcaacatggagactggtgagacctgcgtgtaccccactcagcccagtggnccanaanaactggnncatcngcangaaccccnnggacangaggcntgtctggttcggcgagagcatgaccnatggattccanttnnagtatggnggccagggctccgaccctg

SEQ ID NO: 1013 - DNA, 157 bp, Homo sapiens
  misc_feature 21, 22, 127, 136, 137: n = A,T,C or G
atagaaccccgcccgcacctnncgtgacctcaagatgtgccactctgactggaagagtggagagtactggattgaccccaaccaaggctgcaacctggatgccatcaaagtcttctgcaacatgganactggtganncctgcgtgtaccccactcag

SEQ ID NO: 1014 - DNA, 621 bp, Homo sapiens
gtggacaccaccctcaagagcctgagccagcagatcgagaacatccggagcccagagggcagccgcaagaaccccgcccgcacctgccgtgacctcaagatgtgccactctgactggaagagtggagagtactggattgaccccaaccaaggctgcaacctggatgccatcaaagtcttctgcaacatggagactggtgagacctgcgtgtaccccactcagcccagtgtggcccagaagaactggtacatcagcaagaaccccaaggacaagaggcatgtctggttcggcgagagcatgaccgatggattccagttcgagtatggcggccagggctccgaccctgccgatgtggccatccagctgaccttcctgcgcctgatgtccaccgaggcctcccagaacatcacctaccactgcaagaacagcgtggcctacatggaccagcagactggcaacctcaagaaggccctgctcctccagggctccaacgagatcgagatccgcgccgagggcaacagccgcttcacctacagcgtcactgtcgatggctgcacgagtcacaccggagcctggggcaagacagtgattgaatacaaaaccaccaagacctcccgcctg

SEQ ID NO: 1015 - DNA, 104 bp, Homo sapiens
  misc_feature 91, 95: n = A,T,C or G
gtggacaccaccctcaagagcctgagccagcagatcgagaacatccggagcccagagggcagccgcaagaaccccgcccgcacctgccgtnctcnagatgtgcc

SEQ ID NO: 1016 - DNA, 101 bp, Homo sapiens
gctgaccaggcggaaagaggagctgcccatgaaggggggcaccctgggcgggatccctggggagcccgccgtggaccaccgagatgtggatgagctgctgg

SEQ ID NO: 1017 - DNA, 172 bp, Homo sapiens; identical to SEQ ID NO: 858

SEQ ID NO: 1018 - DNA, 637 bp, Homo sapiens
gtggacaccaccctcaagagcctgagccagcagatcgagaacatccggagcccagagggcagccgcaagaaccccgcccgcacctgccgtgacctcaagatgtgccactctgactggaagagtggagagtactggattgaccccaaccaaggctgcaacctggatgccatcaaagtcttctgcaacatggagactggtgagacctgcgtgtaccccactcagcccagtgtggcccagaagaactggtacatcagcaagaaccccaaggacaagaggcatgtctggttcggcgagagcatgaccgatggattccagttcgagtatggcggccagggctccgaccctgccgatgtggccatccagctgaccttcctgcgcctgatgtccaccgaggcctcccagaacatcacctaccactgcaagaacagcgtggcctacatggaccagcagactggcaacctcaagaaggccctgctcctccagggctccaacgagatcgagatccgcgccgagggcaacagccgcttcacctacagcgtcactgtcgatggctgcacgagtcacaccggagcctggggcaagacagtgattgaatacaaaaccaccaagacctcccgcctgcccatcatcgatgtgg

SEQ ID NO: 1019 - DNA, 623 bp, Homo sapiens
gtggacaccaccctcaagagcctgagccagcagatcgagaacatccggagcccagagggcagccgcaagaaccccgcccgcacctgccgtgacctcaagatgtgccactctgactggaagagtggagagtactggattgaccccaaccaaggctgcaacctggatgccatcaaagtcttctgcaacatggagactggtgagacctgcgtgtaccccactcagcccagtgtggcccagaagaactggtacatcagcaagaaccccaaggacaagaggcatgtctggttcggcgagagcatgaccgatggattccagttcgagtatggcggccagggctccgaccctgccgatgtggccatccagctgaccttcctgcgcctgatgtccaccgaggcctcccagaacatcacctaccactgcaagaacagcgtggcctacatggaccagcagactggcaacctcaagaaggccctgctcctccagggctccaacgagatcgagatccgcgccgagggcaacagccgcttcacctacagcgtcactgtcgatggctgcacgagtcacaccggagcctggggcaagacagtgattgaatacaaaaccaccaagacctcccgcctgcc

SEQ ID NO: 1020 - DNA, 233 bp, Homo sapiens
ggtagagaaccctgcggctgcgctttcggtgcccgcgagaggcgctggggcgcccggcaggggccgctgcgggctccgggagagggtcgaaggtgaagatctcaggaccggagccccgccggggtcccgggatggtggagggggccggggtcggggcctgcaggatggtcatggtcgggtggcagctgcgagagtgacacatggtgagccgagcggaggtcgacgcggccgcg

SEQ ID NO: 1021 - DNA, 180 bp, Homo sapiens
gagctgatgcgggaaccgggcccactcgtgtaggagcggctgctgaaggcccgggggccagaggtggacaccttgtaggacttctgggtcaccctgatggacatggtagaggcaggagtggaggcaggcgggccgaaccaggcggagatcctagaaggagcggaggtcgacgcggccgcg

SEQ ID NO: 1022 - DNA, 636 bp, Homo sapiens; identical to SEQ ID NO: 1005

SEQ ID NO: 1023 - DNA, 162 bp, Homo sapiens
aggcggagaggatcatgtccgggaactgcggggtagtagcgatctgggttacccagccgttgtggcccttgagggtgccacgaagggtcatctgctcagtcatggcggcggcgagagcgtgtgtcgctgcagcgacgaggatggcacgtcgacgcggccgcg

SEQ ID NO: 1024 - DNA, 124 bp, Homo sapiens
tccactagtccagtgtggtggaattcgcggccgcgtcgacgccgagcaggaggcgccatcatgggagtggacatccgccataacaaggaccgaaaggttcggcgcaaggagcccaagagccagg

SEQ ID NO: 1025 - DNA, 635 bp, Homo sapiens
  misc_feature 618: n = A,T,C or G
gcccccaattccagctgccacaccacccacggtgactgcattagttcggatgtcatacaaaagctgattgaagcaaccctctactttttggtcgtgagccttttgcttggtgcaggtttcattggctgtgttggtgacgttgtcattgcaacagaatgggggaaaggcactgttctctttgaagtagggtgagtcctcaaaatccgtatagttggtgaagccacagcacttgagccctttcatggtggtgttccacacttgagtgaagtcttcctgggaaccataatctttcttgatggcaggcactaccagcaacgtcaggaagtgctcagccattgtggtgtacaccaaggcgaccacagcagctgcaacctcagcaatgaagatgaggaggaggatgaagaagaacgtcacgagggcacacttgctctcagtcttagcaccatagcagcccaggaaaccaagagcaaagaccacaacgccggctgcgatgaggaagtagcccacgttgacaaactgcatggcactggacgacagtggcccgaagatcttcagaaaggatgccccatcgattgacacccagatgcccactgccaacagggctgcaccacacagaangatgagcaaattgaaga

SEQ ID NO: 1026 - DNA, 355 bp, Homo sapiens
ccatctgctgttttttctcagcaccttccgtcttttgttcaatacttgagacgaccctccaagatgacctacgggctcctacaacatttttataagcaactgagagaagattcctctcctcattggataattcagctccttgctcagttacagacttcatgcaggctgccatgtcatcatatcgctcagcctgctcggccagtttggccttctgaaccagctcatttttatccatgactggatgttctgtgtccggagtgggtggtggcggcggacggacgggctcagcagtctctgggcggcggcggcggcagcagcggcgaggctgagactctgtcccgtcgacgcggccgcg

SEQ ID NO: 1027 - DNA, 148 bp, Homo sapiens
tgccaccctggtgcccatgactgtggccttggtgcccaggaggggccagagctggtgggtgctggctgttcttctccctctggccctgagcccctggctctggagctgcctgtaggggctgaagggccatcccactgccattctccgg

SEQ ID NO: 1028 - DNA, 479 bp, Homo sapiens
  misc_feature 439: n = A,T,C or G
ggcgtcctggtgcttaccacctggaaactggtgaggtggtgggagaactcctggtggaccctagtggaagccttccagtaatttcttgaagctgagcgctcaggtgagtagggcgacatctggtggccggttgttgaaggtcattgcagagaggaaggaagccgaggaggggagcctgcagtgagggcgtcctggggttctccggttctcaccacccttgggccacgccgtctagtccacacctgaggagttggtcaggtagaaggggcggatgaccgtgcggaagccgttgaagtgccctgccgggcaggggaaggaggaggtgctcttcgagctgttggtgtccagggcactgggaatcgcagccttccagccctcgaaatcggtgacgtctgccacgaagagcccttcgcagagcatcagggctttgttttcgtangcaatggtgcgatctgagccgccagacttggtgaggccca

SEQ ID NO: 1029 - DNA, 64 bp, Homo sapiens
  misc_feature 5, 6: n = A,T,C or G
gcgtnnatgtagttcttgagcacctcgggaatgggcccctcggtcacggctggcaccgcctggg

SEQ ID NO: 1030 - DNA, 531 bp, Homo sapiens
cctgtcagagtggcactggtagaagttccaggaaccctgaactgtaagggttcttcatcagtgccaacaggatgacatgaaatgatgtactcagaagtgtcctggaatggggcccatgagatggttgtctgagagagagcttcttgtcctacattcggcgggtatggtcttggcctatgccttatgggggtggccgttgtgggcggtgtggtccgcctaaaaccatgttcctcaaagatcatttgttgcccaacactgggttgctgaccagaagtgccaggaagctgaataccatttccagtgtcatacccagggtgggtgacgaaaggggtcttttgaactgtggaaggaacatccaagatctctggtccatgaagattggggtgtggaagggttaccagttggggaagctcgtctgtctttttccttccaatcaggggctcgctcttctgattattcttcagggcaatgacataaattgtatattcggttcccggttccaggccagtaatagtagcctctgtgacacca

SEQ ID NO: 1031 - DNA, 518 bp, Homo sapiens
  misc_feature 443: n = A,T,C or G
cctgggtggtggagcgaatgggccgattccaccggatcctggagcctggtttgaacatcctcatccctgtgttagaccggatccgatatgtgcagagtctcaaggaaattgtcatcaacgtgcctgagcagtcggctgtgactctcgacaatgtaactctgcaaatcgatggagtcctttacctgcgcatcatggacccttacaaggcaagctacggtgtggaggaccctgagtatgccgtcacccagctagctcaaacaaccatgagatcagagctcggcaaactctctctggacaaagtcttccgggaacgggagtccctgaatgccagcattgtggatgccatcaaccaagctgctgactgctggggtatccgctgcctccgttatgagatcaaggatatccatgtgccaccccgggtgaaagagtctatgcagatgcangtggaggcagagcggcggaaacgggccacagttctagagtctgaggggacccgagagtcggccatcaatgtggca

SEQ ID NO: 1032 - DNA, 116 bp, Homo sapiens
aaatatttatgtggaattaattaaaggtagttggctatatcgctatcatttcattcttttgacattatgtgaatattttactggaaaataagactaataaattgttaaaagttttt

SEQ ID NO: 1033 - DNA, 241 bp, Homo sapiens
caagggtcatgatggcaggagtaatcagaggtgttcttgtgttgtgataagggtggagaggttaaaggagccacttattagtaatgttgatagtagaatgatggctagggtgacttcatatgagattgtttgggctactgctcgcagtgcgccgatcagggcgtagtttgagtttgatgctcaccctgatcagaggattgagtaaacggctaggctagaggtggctagaataaataggagg

SEQ ID NO: 1034 - DNA, 234 bp, Homo sapiens
ccacagctgggcgcttcacccagtggtactttggtgcctactccattgtggcgggcgtgtttgtgtgcctgctggagtacccccgggggaagaggaagaagggctccaccatggagcgctggggacagaagcacatgaccgccgtggtgaagctgttcgggccctttaccaggaattactatgttcgggccgtcctgcatctcctgctctcggtgcccgccggcttcctgctgg

SEQ ID NO: 1035 - DNA, 434 bp, Homo sapiens
  misc_feature 39, 42, 48, 113, 135, 137, 151, 185, 219, 228, 250, 254,268, 271, 275, 307, 344, 355, 358, 369, 376, 404, 409, 416,427: n = A,T,C or G
gtacaagcttttttttttttttttttttttttttttttnggntacggnagcacttttatttttccttacacaatgacgtgttgctggggcctaatgttctcacataacagtanaaaaccaaaatttgttgtcatntnttcaaagaatcganaattgcgtacaaaaaaaaccttacataaattaanaatgaatacatttacaggcgtaaatgcaaaccgnttccaactnaaagcaagtaacagcccacggngttntggccaaagacatnagntaanaaaggaaactgggtcctacggcttggactttncaaccctgacagacccgcaagacaaaacaactggttnttgccagcctntanagaaatcccanaacactnagccctgacacgttaataccctgcacanatcanaggctgntggccacacanactcacc

SEQ ID NO: 1036 - DNA, 294 bp, Homo sapiens
aaagccatgggaacccagatcaccagatccggagcctgactctagcccctgagccacctgttgccctaacaccctgtctgactctctcccgctgcagcagccagtccctcctgcactccagcaactccagccatcagtcatcttccagatccttggaaagtccagccaactcttcctccagcctccacagccttggctcagtgtccctgtgtacaagacccagtgacttccaggctcccagaaaccccaccctaaccatgggccaacccagaacaccccactctccaccactgg

SEQ ID NO: 1037 - DNA, 547 bp, Homo sapiens
  misc_feature 55, 56, 64, 65, 258, 314, 513: n = A,T,C or G
aaagatatgaacagcttaattttccgtgtgattatctaattaaaaaagaaaaacnnaacaagcnnaatgttcaagttaaaaaaaaaacataccgggtgagcaatgcactaaaattatccacatgaaaacaaatggtctgtaatcttataaaccaacatagcatttcactgtcaacaatgtgaaaatttaatatcttctcaaacaggcataagatgaagaagtgctattttttaattgtaaaaggaacttatgtaatgntaaaattacattataatttttcattccgaattgacaaatgatttcaaaaacaaggnatcaaagtttgactgcaaatagtaatgcaatataatttcataaaaatccttcaatttctatttttttccttttctgtagttgacatatgaagaccacttcaatttctaaaaaagggaaccattccaattttccctccccaagaaaatgtctcacaattacaaagtagaaaaacagccgttcataaaatgcaaaaaaaanttctgattttatacatgaaataatttctagatca

SEQ ID NO: 1038 - DNA, 451 bp, Homo sapiens
ccactctgcccaggagctgccgaccatcaggacgcctgcagacatttacagagcctttgttgatgttgtgaatggagaatatgtccctcgcaaatccatcctgaagtctcgaagtagagagaatagtgtgtgtagcgacactagtgaaagcagtgctgctgaatttgatgataggcggggagttttgaggagtatcagctgcgaagaagccacttgcagtgacaccagtgagagcattttggaagaggaaccacaagaaaatcaaaagaaacttttgcccttatcagtaacacctgaggctttttctggaactgttatagaaaaagaatttgtatcaccttccttaacaccacccccagccattgctcatcccgcactacccactattccagaacgaaaggaagttctgttggaagcatctgaagaaactggaaagagggtttcaaagttt

SEQ ID NO: 1039 - DNA, 533 bp, Homo sapiens
ccaagcccgtgcaccgttttttgtaaggtatctctttaagcgcctgggaccccaagcgagagtccgaaattagcagagcgctaaaaggaggggcccgaaggcagtggggctttgagctagaagcctctttttacctgcttgacaggtaatttctgtaattggttgtgattgaatttgatagggtagagaattaaatgagggaagctgtgtatacttcctagtaagagctattatatgactgattacattaacatcatatggaaaaaaattgtcaaaagtactccgggaaagcccttaaatagttggtaaagtacagaacacatgattgtcaatatatgtaaatacaggatgagctaggacagaggggcccttctttcacaccacttaaattagttcccactttaaccttgtttgagattgacttctggagagttaaatgcagatagacttaactctcctaagtcaggtgagactgagagctgactgctacaataattacggagcccaaatgcagtaaaacagcctgtttttca

SEQ ID NO: 1040 - DNA, 317 bp, Homo sapiens
  misc_feature 149, 228: n = A,T,C or G
tgcctgctggggattactcgatcaaaaccttccttccctggctacttcccttcctcccggggccttccttttgaggagctggaggggtggggagctagaggccacctatgccagtgctcaaggttactgggagtgtgggctgcccttgntgcctgcacccttccctcttccctctccctctctctgggaccactgggtacaagagatgggatgctccgacagcgtctncaattatgaaactaatcttaacccctgtgctgtcagataccctgtttctggagtcacatcagtgaggagggatgtgggtaagaggagca

SEQ ID NO: 1041 - DNA, 407 bp, Homo sapiens
  misc_feature 45, 88, 184, 236, 238: n = A,T,C or G
ccaagacagtccacttacatggatcgtgtcttcaagcaatttgtncaagccatggttgagcatggacatgaactctcttaacatgtanttctttgggtgcattttgtctgaaccacaattgtgaaggcagctcagcttagtgcacaaattttaactgttgtatataaagcaaataagtcagcanatgggtgaagaggtccagaatgatatgcaaaaactactttttagagaaacanancaactttgtagcaacaaattaaatatagtattagattgttacttacgtagattttatttttactatgccttaccaagtacatccttaaacaaagtagtatgtacatgaaattgcacttaaccaaaactattgtgtaaaacaaatttttaattcctcagggttttaattt

SEQ ID NO: 1042 - DNA, 519 bp, Homo sapiens
  misc_feature 461: n = A,T,C or G
ccaccacacccaattccttgctggtatcatggcagccgccacgtgccaggattaccggctacatcatcaagtatgagaagcctgggtctcctcccagagaagtggtccctcggccccgccctggtgtcacagaggctactattactggcctggaaccgggaaccgaatatacaatttatgtcattgccctgaagaataatcagaagagcgagcccctgattggaaggaaaaagacagacgagcttccccaactggtaacccttccacaccccaatcttcatggaccagagatcttggatgttccttccacagttcaaaagacccctttcgtcacccaccctgggtatgacactggaaatggtattcagcttcctggcacttctggtcagcaacccagtgttgggcaacaaatgatctttgaggaacatggttttaggcggaccacaccggcccacaacggncacccccataaaggcataggccaaagaccatacccgccgaatgtaggacaagaaagct

SEQ ID NO: 1043 - DNA, 294 bp, Homo sapiens
ccatgacagcagctactgcttcacatagcagcatacgccacatgttcaccttcaatatttttccagtctgtctatctttctccacacagtagcagctatcatagaactctgtgaaagcagttgccagctcatatatataatcacagagagtgtggagaaataagtcatctaaaatcttttgcagaatctcagggaaccgtaaaatgcaccggcctagtttccattccttctcatgatccaaaagaatcttggtttctcgagcagctttttggagcatttcttcatcaatattgg

SEQ ID NO: 1044 - DNA, 384 bp, Homo sapiens
ccaggcgctccttgtcggcatcagggagggtggccttgaactgctcatgggctgtggtcagtccctggatctcctcaatggtgtgcacaatgaaggtgtcctgcaggtcctccatggccccctccatccagttgttgaagggtgcagcccgcttggcatactccaagtacagctggtcaatggtctccagcagtttctcggtccgctccagagcttcccttcgcttctgagttagggcccccagattgtcccactggtcacagatcttttggcaacgggcgttgacactgggtgagtcataatagtccagctcattgagctcctgtgcgatggcggcaatctgctccacacggtcctggtgggcagccaggtcactctcgaagg

SEQ ID NO: 1045 - DNA, 456 bp, Homo sapiens
  misc_feature 118, 119: n = A,T,C or G
aaaactaatgttacaaatctgtattatcacttgtatataaatagtatatagctgatcattaataaggtgtataagtacaatgtattctaaaactgttaagcaaaaaaaaaaaacaaannaaaaatccaagtgtcctcctccaccactcacgctggtgatcactgtgctctctgccagctgcgtggagtgacgggaggagggaatcactgtgtgtgcgagagtgcttcagactcaatttccaaaataattttcacccctctaagcatgtaaatatacaaagatggatccttcatagaaattaaaaaatcaatttgagctcatttcgaatacagaacaagtatggcacagatggaagtcctgccacgtttcctttaatgatgctgactcttgtatcacacaggccagcatgaagtttcttactcagactttacaggcattttccgtaattcaatcagt

SEQ ID NO: 1046 - DNA, 136 bp, Homo sapiens
  misc_feature 3, 27, 80, 97, 104: n = A,T,C or G
atnatctgtttctaaacgaaagctgcngcggaatgagagtgagccttcagagatgaaagccatggctctgaaaggtggcngggcagaaggaaccctncgttcanctaaaagtgaggagtctcttacatctctccat

SEQ ID NO: 1047 - DNA, 453 bp, Homo sapiens
aaaaaaatccaaatgctggcattgtccagaaaaatttaacaggtttatttataattattataaagttgaaccgctgaaacttgttcactgaaacattttaacttgcattaatgctttacgtctccgcatttatattaaaaattcacacacaaatgaaaatggaaaaactgccaatacctgatttctgtcccctatttttccactcgcaatcatatacttaggtaccttttgaccccatggaaaaaaaatatctaacgttcagaactaccaataacaggaagaagagaaattttttttttttttttgggaatgaaatgtttcccatcatagtggattcttaagcacgttctccacgtatgcggcgtgctagctggatgtcttttggcataattgttacacgtttggcatggatagcacacaggttggtgtcttcaaaaaggccaaccagatagg

SEQ ID NO: 1048 - DNA, 219 bp, Homo sapiens
  misc_feature 13: n = A,T,C or G
aaaatcacaaacnttaacggcagtaggcaccaccatgtaaaagtgagctcagacgtctctaaaaaatgtttcctttataaaagcacatggcggttgaatcttaaggttaaattttaatatgaaagatcctcatgaattaaatagttgatgcaatttttaacgttaattgatataaaaaaaaacaacaaaattaggcttgtaaaactgactttttcatta

SEQ ID NO: 1049 - DNA, 2465 bp, Homo sapiens
agcaaataatcaatttagcattacaaaaaacagggatggtagggaaaatagaaggagaaaactctaaaataggtgatgataatgaaaatttaacctttaaattagaagtaaatgagctgagtggtaaattagacaacactaacgaatacaatagtaatgatggtaagaaattaccccagggtgaatcacgaagttacgaagtcatgggaagtatggaagaaaccttatgcaatatagatgacagagatggaaatcgcaatgtccatttagaatttacagaaagagagagtaggaaggatggagaggatgaatttgtcaaagaaatgagagaggaaagaaaatttcagaaattgaagaataaagaggaggttttaaaagcctccagagaagaaaaagtgttgatggatgaaggagcagtacttaccctggcagccgacctttcatcagcaacactggatattagtaagcaatggagtaatgtcttcaacattctgagagaaaatgattttgaacctaaatttctgtgtgaagttaaattagcatttaaatgtgatggtgaaataaagacattttcagatctgcaaagccttagaaaatttgccagccaaaaatcttctatgaaagaattactgaaagatgtactcccacaaaaggaagaaataaatcaaggaggaagaaaatatggaattcaagaaaaaagggataaaaccctaatagactcaaagcatagagctggagaaataaccagtgatggcttgagcttcctatttcttaaagaagtaaaagttgctaagccagaggagatgaaaaacttagagactcaagaggaagagttttccgagctagaggagctggatgaagaggcctcagggatggaggatgatgaagatacctcagggctggaggaggaggaggaagagccctcagggctggaggaggaagaagaagaagaggcttcagggttggaggaggatgaggcctcagggctagaggaggaagaggaacagacttcagaacaggactcaacctttcagggtcatactttggtagatgcaaagcatgaagttgagataaccagtgatggcatggaaactactttcattgactctgtagaggattctgaatcagaggaggaagaagaaggaaagagctctgaaacaggaaaggtaaagactacctccctgactgagaaaaaagcctcacgtagacaaaaagaaattccctttagttatttggttggggactctgggaagaaaaagttggtgaaacaccaggtggtgcacaaaacccaggaggaagaggaaacagctgtgcccacaagtcaaggaactggcacaccctgtctgaccttatgttaggcctctccctcaaagtcactagagatgagtcatgatgagcataaaaagcattcacatacaaatttgagtatttcaacaggagtcaccaaacttaagaaaacagaagaaaagaaacacagaactctgcacacagaagaactaacatccaaagaagcagacttaacagaggaaacagaagaaaacttgagaagtagtgtgattaatagcatcagagagataaaagaggagattggaaatttgaaaagttcccattcaggtgtcttggaaattgaaaattcagtagatgatctgagtagcagaatggacatacttgaagaaagaatagacagtctagaagatcaaattgaagaattctctaaggatacaatgcaaatgaccaaacagataattagtaaagaaaggcaaagagatatagaggagagatctagaagttgcaacattcgtttgataggaattccagaaaaggagagttatgagaatagggcagaggacataattaaagaaataattgatgaaaactttgcagaactaaagaaaggttcaagtcttgagattgtcagtgcttgtcgagtacctagtaaaattgatgaaaagagactgactcctagacacatcttggtgaaattttggaattctagtgataaagagaaaataataagggcttctagagagagaagagaaattacctaccaaggaacaagaatcaggttgacagcagacttatcactggacacactggatgctagaagtaaatggagcaatgtcttcaaagttctgctggaaaaaggctttaatcctagaatcctatatccagccaaaatggcatttgattttaggggtaaaacaaaggtatttcttagtattgaagaatttagagattatgttttgcatatgcccaccttgagagaattactggggaataatataccttagcacgccagggtgactacaaacaatatgctttcctcccccagcatgcatccaaaaatcaacaagtaaaacgaaaatacacttctacccagaaggatggacagctaatagcgtacttggggatgaggagcaaggaatattacagatattacctagatgttaataaagggtatgttt

SEQ ID NO: 1050 - DNA, 3120 bp, Homo sapiens
aaaggaaacacaagttgcttttgataacacatgatgcaaagaaagaattagaaagaatgagcaatgaagccggtataaatgacaaacaagtgtccaaaggcccaagaagttactaccaaaagctttcaaacaatattggtttatctttaaagacacatccatagcatactttaaaaataaggaacttgaacaaggagaaccacaagaaaaactaaatcttagaggctgcgaagttgtgcccgatgtaaatgtagcaggaagaaaatttggaatcaagttactaatccctgttgccgatggtatgaatgaaatgtatttgagatgtgaccatgagaatcaatacgcccaatggatggctgcctgcatgttggcatcgaagggcaaaaccatggcagacagctcctaccagccagaggtcctcaacatcctttcatttctgaggatgaaaaacaggaactctgcatctcaggtggcttccagtctcgaaaacatggatatgaacccagaatgttttgtgtcaccacggtgtgcaaaaagacacaaatccaaacagctggccgcccggatcctggaggcgcaccagaacgtggcccagatgcccctggtcgaagccaagctgcggttcatccaggcgtggcagtcactgcctgagtttggcctcacctactaccttgtcagatttaaaggaagcaaaaaagatgacattctgggagtttcatataacaggttgattaaaattgatgcagccaccgggattccagtgacaacatggagattcacaaatatcaaacagtggaatgtaaactgggaaacccggcaggtggtcatcgagtttgaccaaaacgtctttactgctttcacctgcctgagtgcagattgcaagattgtgcacgagtacattggcggctacattttcttgtccacccgctccaaggaccagaatgaaacactcgatgaggacttgttccacaaattgaccggcggtcaggattgaaacaagcacgcgtgctcggctcacaccaacaaggcaagccaaaggcgcccctccccagagggatccctaacgtgcccagcatgtagattctggactaacagacaacatacattcaccgctggtcacccagatcctcattcaaacccactgctggcacatccctttccttactttgccctgtgctaccagccacggaaggagcctctcttgttttttctataaaatgggtaggcaggagaaaagcaggtgccctaagattgctctaaggcccagcatgtggttacagttctctgacttgcagaacctgccaggtgtatggctacaagttatcctcgtgctgatctgtctcattactaagtcaatggagaagacagaaaggtaaaaatcacgtgtagcaagaacaactcttatttcacaaactcaggtatgaaacgaaacgcctgtccttcatggaactgcttttagctcctgtcttttcaaaatggcagagggagttcctacacacactttttccctggaggccaaggtctaggggtagaaaggggaggggtggggctaccaggtagcagttgacaacccaaggtcagaggagtggccctcagtgtcatctgtccacagtgatacctgccaagatgaccactgacccacatctggtcttagtcattggtctcctcagatttctggggccacctgcaagccccattccattcctacagatctctcagccacctgtaagtcctttgtgaagatgtgggtgacacagggggacaggaaaacccatttctcaacccagatccatgtctccactgcttctactctgggttgggattcaggaagacaggcacagtcctctctgttcatagaaacacctgccagtgtcaaggattccagtcaggtgtctatcccaactggtcagggagagaagggcagacccattctcaaagaccaccatgttcaaggtctgacagctccccactggctgcccccacaggggctttaggctggtctgggtcatggggaagcgtccctcttatcgctggtctgtgttctcctggatttggtatctatgttggtacgactcctggccttttatctaaaggactttggcttttgtaaatcacaagccaataatagacttttttctccccctctgttttttgctgtgtcatctctgccttgagactgccttgagacagtgcttgccctgagagagtgagccaattaacagctgcctgaattgtcattttccattttggtttgttagaggtgggaggggtgggttttgagaaggtcaaaagcaataccagaagtaaagggaaatatcagacaatattttattattttttcatagatgttctgccacacaaagaacttggggtgtaaggataaggcaaaagctccaatcccatttttcagttctcctaggatgcacccctcagggagcctggccagagttccgaggcccgtgagcgtcagctgttgctttattttccatcaaagccctctgagaagtgagacctcagcaattccgggagccacatagagacagacttggcaagggaccccctggttctgagccagtagctgccatctggaaattcctcttttagcctctccttagaggtgaatgtgaatgaagcctcccaggcacccgctgaatttctgaggccttgcttaaagctcagaagtggtttaggcatttggaaaatctggttcacatcataaagaacttgatttgaaatgttttctatagaaacaagtgctaagtgtaccgtattatacttgatgttggtcatttctcagtcctatttctcagttctattattttagaacctagtcagttctttaagattataactggtcctacattaaaataatgcttctcgatgtcagattttacctgtttgctgctgagaacatctctgcctaatttaccaaagccagaccttcagttcaacatgcttccttagcttttcatagttgtctgacatttccatgaaaacaaaggaaccaactttgttttaaccaaactttgtttggttacagttttcaggggagcgtttcttccatgacacacagcaacatcccaaagaaataaacaagtgtgacaaaaaaaaaaaaaaaaa

SEQ ID NO: 1051 - DNA, 1745 bp, Homo sapiens
gcgcccctggcagccttcaacgtcggtccccaggcagcatggtgaggtctgctcccggaccctcgccaccatgtacgtgagctacctcctggacaaggacgtgagcatgtaccctagctccgtgcgccactctggcggcctcaacctggcgccgcagaacttcgtcagccccccgcagtacccggactacggcggttaccacgtggcggccgcagctgcagcgcagaacttggacagcgcgcagtccccggggccatcctggccggcagcgtatggcgccccactccgggaggactggaatggctacgcgcccggaggcgcggccgccgccaacgccgtggctcacgcgctcaacggtggctccccggccgcagccatgggctacagcagccccgcagactaccatccgcaccaccacccgcatcaccacccgcaccacccggccgccgcgccttcctgcgcttctgggctgctgcaaacgctcaaccccggccctcctgggcccgccgccaccgctgccgccgagcagctgtctcccggcggccagcggcggaacctgtgcgagtggatgcggaagccggcgcagcagtccctcggcagccaagtgaaaaccaggacgaaagacaaatatcgagtggtgtacacggaccaccagcggctggagctggagaaggagtttcactacagtcgctacatcaccatccggaggaaagccgagctagccgccacgctggggctctctgagaggcaggttaaaatctggtttcagaaccgcagagcaaaggagaggaaaatcaacaagaagaagttgcagcagcaacagcagcagcagccaccacagccgcctccgccgccaccacagcctccccagcctcagccaggtcctctgagaagtgtcccagagcccttgagtccggtgtcttccctgcaagcctcagtgtctggctctgtccctggggttctggggccaactgggggggtgctaaaccccaccgtcacccagtgacccaccggggtctgcagcggcagagcaattccaggctgagccatgaggagcgtggactctgctagactcctcaggagagacccctcccctcccacccacagccatagacctacagacctggctctcagaggaaaaatgggagccaggagtaagacaagtgggatttggggcctcaagaaatatactctcccagatttttactttttccatctggctttttctgccactgaggagacagaaagcctccgctgggcttcattccggactggcagaagcattgcctggactgaccacaccaaccagcttcatctatccgactcttctcttcctagatctgcaggctgcacctctggctagagccgaggggagagagggactcaagggaaaggcaagcttgaggccaagatggctgctgcctgctcatggccctcggaggtccagctgggcctcctgcctccgggcagcaaggtttacactgcggaacgcaaaggcagctaagatagaaagctggactgaccaaagactgcagaacccccaggtggccctgcgtcttttttctcttccctttcccagaccaggaaaggcttggctggtgtatgcacagggtgtggtatgagggggtggttattggactccaggcctgaccagggggcccgaacaggacttgttagagagcctgtcaccagagcttctctgggctgaatgtatgtcagtgctataaatgccagagccaacctgg

SEQ ID NO: 1052 - DNA, 1104 bp, Homo sapiens
ctctagagtcgagatccattgtgctctaaagtggatacagaaatctctgcaggcaagttgctccagagcatattgcaggacaagcctgtaacgaatagttaaattcacggcatctggattcctaatccttttccgaaatggcaggtgtgagtgcctgtataaaatattctatgtttaccttcaacttcttgttctggctatgtggtatcttgatcctagcattagcaatatgggtacgagtaagcaatgactctcaagcaatttttggttctgaagatgtaggctctagctcctacgttgctgtggacatattgattgctgtaggtgccatcatcatgattctgggcttcctgggatgctgcggtgctataaaagaaagtcgctgcatgcttctgttgtttttcataggcttgcttctgatcctgctcctgcaggtggcgacaggtatcctaggagctgttttcaaatctaagtctgatcgcattgtgaatgaaactctctatgaaaacacaaagcttttgagcgccacaggggaaagtgaaaaacaattccaggaagccataattgtgtttcaagaagagtttaaatgctgcggtttggtcaatggagctgctgattggggaaataattttcaacactatcctgaattatgtgcctgtctagataagcagagaccatgccaaagctataatggaaaacaagtttacaaagagacctgtatttctttcataaaagacttcttggcaaaaaatttgattatagttattggaatatcatttggactggcagttattgagatactgggtttggtgttttctatggtcctgtattgccagatcgggaacaaatgaatctgtggatgcatcaacctatcgtcagtcaaacccctttaaaatgttgctttggctttgtaaatttaaatatgtaagtgctatataagtcaggagcagctgtctttttaaaatgtctcggctagctagaccacagatatcttctagacatattgaacacatttaagatttgagggatataagggaaaatgatatgaatgtgtatttttactcaaaataaaagtaactgtttaaaaaaaaaaaaaaaaaaaaa

SEQ ID NO: 1053 - DNA, 480 bp, Homo sapiens
cagtcctgagctgcgtcccggagcccacggtggtcatggctgccagagcgctctgcatgctggggctggtcctggccttgctgtcctccagctctgctgaggagtacgtgggcctgtctgcaaaccagtgtgccgtgccagccaaggacagggtggactgcggctacccccatgtcacccccaaggagtgcaacaaccggggctgctgctttgactccaggatccctggagtgccttggtgtttcaagcccctgcaggaagcagaatgcaccttctgaggcacctccagctgcccccggccgggggatgcgaggctcggagcacccttgcccggctgtgattgctgccaggcactgttcatctcagcttttctgtccctttgctcccggcaagcgcttctgctgaaagttcatatctggagcctgatgtcttaacgaataaaggtcccatgctccacccgaggacagttcttcgtgcctg

SEQ ID NO: 1054 - DNA, 1078 bp, Homo sapiens
cagccactagcgcagctcgagcgatggcctatgtccccgcaccgggctaccagcccacctacaacccgacgctgccttactaccagcccatcccgggcgggctcaacgtgggaatgtctgtttacatccaaggagtggccagcgagcacatgaagcggttcttcgtgaactttgtggttgggcaggatccgggctcagacgtcgccttccacttcaatccgcggtttgacggctgggacaaggtggtcttcaacacgttgcagggcgggaagtggggcagcgaggagaggaagaggagcatgcccttcaaaaagggtgccgcctttgagctggtcttcatagtcctggctgagcactacaaggtggtggtaaatggaaatcccttctatgagtacgggcaccggcttcccctacagatggtcacccacctgcaagtggatggggatctgcaacttcaatcaatcaacttcatcggaggccagcccctccggccccagggacccccgatgatgccaccttaccctggtcccggacattgccatcaacagctgaacagcctgcccaccatggaaggacccccaaccttcaacccgcctgtgccatatttcgggaggctgcaaggagggctcacagctcgaagaaccatcatcatcaagggctatgtgcctcccacaggcaagagctttgctatcaacttcaaggtgggctcctcaggggacatagctctgcacattaatccccgcatgggcaacggtaccgtggtccggaacagccttctgaatggctcgtggggatccgaggagaagaagatcacccacaacccatttggtcccggacagttctttgatctgtccattcgctgtggcttggatcgcttcaaggtttacgccaatggccagcacctctttgactttgcccatcgcctctcggccttccagagggtggacacattggaaatccagggtgatgtcaccttgtcctatgtccagatctaatctattcctggcataactcatgggaaaacagaattatcccctagactcctttctaagcccctaataaaatgtctgagggtgtc

SEQ ID NO: 1055 - DNA, 2872 bp, Homo sapiens
aggaacaggccgcacacaacagcattccctggcagtaccaccatgccaggcgtcagtcaggaatctacagcttcccacagcagcccaggctccacagacacaacactgtcccctggcagtaccacagcatcatcccttggtccagaatctactaccttccacagcggcccaggctccactgaaacaacactcttacctgacaacaccacagcctccggcctccttgaagcatctacgcccgtccacagcagcactggatcgccacacacaacactgtcccctgccggctctacaacccgtcagggagaatctaccaccttccagagctggcctaactcgaaggacactacccctgcacctcctactaccacatcagcctttgttgagctatctacaacctcccacggcagcccgagctcaactccaacaacccacttttctgccagctccacaaccttgggccgtagtgaggaatcgacaacagtccacagcagcccagttgcaactgcaacaacaccctcgcctgcccgctccacaacctcaggcctcgttgaagaatctacgacctaccacagcagcccgggctcaactcaaacaatgcacttccctgaaagcgacacaacttcaggccgtggtgaagaatcaacaacttcccacagcagcacaacacacacaatatcttcagctcctagcaccacatctgcccttgttgaagaacctaccagctaccacagcagcccgggctcaactgcaacaacacacttccctgacagctccacaacctcaggccgtagtgaggaatcaacagcatcccacagcaaccaagacgcaacgggaacaatagtcctacctgcccgctccacaacctcagttcttcttggagaatctacgacctcacccatcagttcaggctcaatggaaacgacagcgttacccggcagtaccacaacgccaggcctcagtgagaaatctaccactttccacagtagccccagatcaccagccacaacactctcacctgccagcacgacaagctcaggcgtcagtgaagaatccaccacctcccacagccgaccaggctcaacgcacacaacagcattccctgacagcaccaccacgccaggcctcagtcggcattctacaacttcccacagcagcccaggctcaacggatacaacactgttacctgccagcaccaccacctcaggccccagtcaggaatcaacaacttcccacagcagcccaggttcaactgacacagcactgtcccctggcagtaccacagccttatcctttggtcaagaatctacaaccttccacagcagcccaggctccactcacacaacactcttccctgacagcaccacaagctcaggcatcgttgaagcatctacacgcgtccacagcagcactggctcaccacgcacaacactgtcccctgccagctccacaagccctggacttcagggagaatctaccgccttccagacccacccagcctcaactcacacgacgccttcaactcctagcaccgcaacagcccctgttgaagaatctacaacctaccaccgcagcccaagctcgactccaacaacacacttccctgccagctccacaacttcgggccacagtgagaaatcaacaatattccacagcagcccagatgcaagtggaacaacaccctcatctgcccactccacaacctcaggtcgtggagaatctacaacctcacgcatcagtccaggctcaactgaaataacaacgttacctggcagtaccacaacaccaggcctcagtgaggcatctaccaccttctacagcagccccagatcaccaaccacaacactctcacctgccagcatgacaagcctaggcgtcggtgaagaatccaccacctcccgtagccaaccaggttctactcactcaacagtgtcacctgccagcaccaccacgccaggcctcagtgaggaatctaccaccgtctacagcagcagcccaggctcaactgaaaccacagtgttccctcgcagcaccacaacctcagttcgtggtgaagagcctacaaccttccacagccggccagcctcaactcacacaacactgttcactgaggacagcaccacctcgggcctcactgaagaatctacagccttccccggcagcccagcctccacccaaacagggttacctgccacactcacaaccgcagacctcggtgaggaatcaactacctttcccagcagctcaggctcaactggaacaacactctcacctgcccgctccaccacctctggcctcgttggagaatccacaccctcacgcctcagtccaagctcaaccgaaacaacaactttacccggcagtcccacaacaccaagcctcagtgagaaatcaaccaccttctacactagccccagatcaccagatgcaacactctcacctgcaaccacaacaagctcaggcgtcagcgaagaatccagcacatcccacagtcaaccaggctcaacgcacacaacagcgttccctgacagcaccaccacctcaggcctcagtcaggaacctaaaacttcccacagcagccaaggctcaacagaggcaacactgtcccctggcagtaccacagcctcatcccttggtcaacaatctacaaccttccacagcagcccaggcgacactgaaaccacactcttacctgatgacaccataacctcaggcctcgtggaggcatctacacccacccacagcagcactggctcgctacacacaacactgacccctgccagctccacaagcgctggccttcaggaagaatctactactttccagagctggccaagctcaagtgacacaacaccttcacctcccggcccgg

SEQ ID NO: 1056 - DNA, 3311 bp, Homo sapiens
tgctaatgcttttggtacaaatggatgtggaatataattgaatattttcttgtttaaggggagcatgaagaggtgttgaggttatgtcaagcatctggcacagctgaaggcagatggaaatatttacaagtacgcaatttgagactaagatattgttatcattctcctattgaagacaagagcaatagtaaaacacatcaggtcagggggttaaagacctgtgataaaccacttccgataagttggaaacgtgtgtctatattttcatatctgtatatatataatggtaaagaaagacaccttcgtaacccgcattttccaaagagaggaatcacagggagatgtacagcaatggggccatttaagagttctgtgttcatcttgattcttcaccttctagaaggggccctgagtaattcactcattcagctgaacaacaatggctatgaaggcattgtcgttgcaatcgaccccaatgtgccagaagatgaaacactcattcaacaaataaaggacatggtgacccaggcatctctgtatctgtttgaagctacaggaaagcgattttatttcaaaaatgttgccattttgattcctgaaacatggaagacaaaggctgactatgtgagaccaaaacttgagacctacaaaaatgctgatgttctggttgctgagtctactcctccaggtaatgatgaaccctacactgagcagatgggcaactgtggagagaagggtgaaaggatccacctcactcctgatttcattgcaggaaaaaagttagctgaatatggaccacaaggtaaggcatttgtccatgagtgggctcatctacgatggggagtatttgacgagtacaataatgatgagaaattctacttatccaatggaagaatacaagcagtaagatgttcagcaggtattactggtacaaatgtagtaaagaagtgtcagggaggcagctgttacaccaaaagatgcacattcaataaagttacaggactctatgaaaaaggatgtgagtttgttctccaatcccgccagacggagaaggcttctataatgtttgcacaacatgttgattctatagttgaattctgtacagaacaaaaccacaacaaagaagctccaaacaagcaaaatcaaaaatgcaatctccgaagcacatgggaagtgatccgtgattctgaggactttaagaaaaccactcctatgacaacacagccaccaaatcccaccttctcattgctgcagattggacaaagaattgtgtgtttagtccttgacaaatctggaagcatggcgactggtaaccgcctcaatcgactgaatcaagcaggccagcttttcctgctgcagacagttgagctggggtcctgggttgggatggtgacatttgacagtgctgcccatgtacaaagtgaactcatacagataaacagtggcagtgacagggacacactcgccaaaagattacctgcagcagcttcaggagggacgtccatctgcagcgggcttcgatcggcatttactgtgattaggaagaaatatccaactgatggatctgaaattgtgctgctgacggatggggaagacaacactataagtgggtgctttaacgaggtcaaacaaagtggtgccatcatccacacagtcgctttggggccctctgcagctcaagaactagaggagctgtccaaaatgacaggaggtttacagacatatgcttcagatcaagttcagaacaatggcctcattgatgcttttggggccctttcatcaggaaatggagctgtctctcagcgctccatccagcttgagagtaagggattaaccctccagaacagccagtggatgaatggcacagtgatcgtggacagcaccgtgggaaaggacactttgtttcttatcacctggacaacgcagcctccccaaatccttctctgggatcccagtggacagaagcaaggtggctttgtagtggacaaaaacaccaaaatggcctacctccaaatcccaggcattgctaaggttggcacttggaaatacagtctgcaagcaagctcacaaaccttgaccctgactgtcacgtcccgtgcgtccaatgctaccctgcctccaattacagtgacttccaaaacgaacaaggacaccagcaaattccccagccctctggtagtttatgcaaatattcgccaaggagcctccccaattctcagggccagtgtcacagccctgattgaatcagtgaatggaaaaacagttaccttggaactactggataatggagcaggtgctgatgctactaaggatgacggtgtctactcaaggtatttcacaacttatgacacgaatggtagatacagtgtaaaagtgcgggctctgggaggagttaacgcagccagacggagagtgataccccagcagagtggagcactgtacatacctggctggattgagaatgatgaaatacaatggaatccaccaagacctgaaattaataaggatgatgttcaacacaagcaagtgtgtttcagcagaacatcctcgggaggctcatttgtggcttctgatgtcccaaatgctcccatacctgatctcttcccacctggccaaatcaccgacctgaaggcggaaattcacgggggcagtctcattaatctgacttggacagctcctggggatgattatgaccatggaacagctcacaagtatatcattcgaataagtacaagtattcttgatctcagagacaagttcaatgaatctcttcaagtgaatactactgctctcatcccaaaggaagccaactctgaggaagtctttttgtttaaaccagaaaacattacttttgaaaatggcacagatcttttcattgctattcaggctgttgataaggtcgatctgaaatcagaaatatccaacattgcacgagtatctttgtttattcctccacagactccgccagagacacctagtcctgatgaaacgtctgctccttgtcctaatattcatatcaacagcaccattcctggcattcacattttaaaaattatgtggaagtggataggagaactgcagctgtcaatagcctagggctgaatttttgtcagataaataaaataaatcattcatcctttttttgattataaaattttctaaaatgtattttagacttcctgtagggggcgatatactaaatgtatatagtacatttatactaaatgtattcctgtagggggcgatatactaaatgtattttagacttcctgtagggggcgataaaataaaatgctaaacaactgggtaaa

SEQ ID NO: 1057 - DNA, 2095 bp, Homo sapiens
aaacactctcacctgccagcatgagaagctccagcatcagtggagaacccaccagcttgtatagccaagcagagtcaacacacacaacagcgttccctgccagcaccaccacctcaggcctcagtcaggaatcaacaactttccacagtaagccaggctcaactgagacaacactgtcccctggcagcatcacaacttcatcttttgctcaagaatttaccacccctcatagccaaccaggctcagctctgtcaacagtgtcacctgccagcaccacagtgccaggccttagtgaggaatctaccaccttctacagcagcccaggctcaactgaaaccacagcgttttctcacagcaacacaatgtccattcatagtcaacaatctacacccttccctgacagcccaggcttcactcacacagtgttacctgccaccctcacaaccacagacattggtcaggaatcaacagccttccacagcagctcagacgcaactggaacaacacccttacctgcccgctccacagcctcagaccttgttggagaacctacaactttctacatcagcccatcccctacttacacaacactctttcctgcgagttccagcacatcaggcctcactgaggaatctaccaccttccacaccagtccaagcttcacttctacaattgtgtctactgaaagcctggaaaccttagcaccagggttgtgccaggaaggacaaatttggaatggaaaacaatgcgtctgtccccaaggctacgttggttaccagtgcttgtcccctctggaatccttccctgtagaaaccccggaaaaactcaacgccactttaggtatgacagtgaaagtgacttacagaaatttcacagaaaagatgaatgacgcatcctcccaggaataccagaacttcagtaccctcttcaagaatcggatggatgtcgttttgaagggcgacaatcttcctcagtatagaggggtgaacattcggagattgctcaacggtagcatcgtggtcaagaacgatgtcatcctggaggcagactacactttagagtatgaggaactgtttgaaaacctggcagagattgtaaaggccaagattatgaatgaaactagaacaactcttcttgatcctgattcctgcagaaaggccatactgtgctatagtgaagaggacactttcgtggattcatcggtgactccgggctttgacttccaggagcaatgcacccagaaggctgccgaaggatatacccagttctactatgtggatgtcttggatgggaagctggcctgtgtgaacaagtgcaccaaaggaacgaagtcgcaaatgaactgtaacctgggcacatgtcagctgcaacgcagtggcccccgctgcctgtgcccaaatacgaacacacactggtactggggagagacctgtgaattcaacatcgccaagagcctcgtgtatgggatcgtgggggctgtgatggcggtgctgctgctcgcattgatcatcctaatcatcttattcagcctatcccagagaaaacggcacagggaacagtatgatgtgcctcaagagtggcgaaaggaaggcacccctggcatcttccagaagacggccatctgggaagaccagaatctgagggagagcagattcggccttgagaacgcctacaacaacttccggcccaccctggagactgttgactctggcacagagctccacatccagaggccggagatggtagcatccactgtgtgagccaacgggggcctcccaccctcatctagctctgttcaggagagctgcaaacacagagcccaccacaagcctccggggcgggtcaagaggagaccgaagtcaggccctgaagccggtcctgctctgagctgacagacttggccagtcccctgcctgtgctcctgctggggaaggctgggggctgtaagcctctccatccgggagcttccagactcccagaagcctcggcacccctgtctcctcctgggtggctccccactctggaatttccctaccaataaaagcaaatctgaaagctcaaaaaaaaaaaaaaaaaaaaaaaaaaaaaaaaaaaa

SEQ ID NO: 1058 - DNA, 15720 bp, Homo sapiens
caacccacaccgcccctgccagccaccatggggctgccactagcccgcctggcggctgtgtgcctggccctgtctttggcagggggctcggagctccagacagagggcagaacccgataccacggccgcaacgtctgcagcacctggggcaacttccactacaagaccttcgacggggacgtcttccgcttccccggcctctgcgactacaacttcgcctccgactgccgaggctcctacaaggaatttgctgtgcacctgaagcggggtccgggccaggctgaggcccccgccggggtggagtccatcctgctgaccatcaaggatgacaccatctacctcacccgccacctggctgtgcttaacggggccgtggtcagcaccccgcactacagccccgggctgctcattgagaagagcgatgcctacaccaaagtctactcccgcgccggcctcaccctcatgtggaaccgggaggatgcactcatgctggagctggacactaagttccggaaccacacctgtggcctctgcggggactacaacggcctgcagagctattcagaattcctctctgacggcgtgctcttcagtcccctggagtttgggaacatgcagaagatcaaccagcccgatgtggtgtgtgaggatcccgaggaggaggtggcccccgcatcctgctccgagcaccgcgccgagtgtgagaggctgctgaccgccgaggccttcgcggactgtcaggacctggtgccgctggagccgtatctgcgcgcctgccagcaggaccgctgccggtgcccgggcggtgacacctgcgtctgcagcaccgtggccgagttctcccgccagtgctcccacgccggcggccggcccgggaactggaggaccgccacgctctgccccaagacctgccccgggaacctggtgtacctggagagcggctcgccctgcatggacacctgctcacacctggaggtgagcagcctgtgcgaggagcaccgcatggacggctgtttctgcccagaaggcaccgtatatgacgacatcggggacagtggctgcgttcctgtgagccagtgccactgcaggctgcacggacacctgtacacaccgggccaggagatcaccaatgactgcgagcagtgtgtctgtaacgctggccgctgggtgtgcaaagacctgccctgccccggcacctgtgccctggaaggcggctcccacatcaccaccttcgatgggaagacgtacaccttccacggggactgctactatgtcctggccaagggtgaccacaacgattcctacgctctcctgggcgagctggccccctgtggctccacagacaagcagacctgcctgaagacggtggtgctgctggctgacaagaagaagaatgcggtggtcttcaagtccgatggcagtgtactgctcaaccagctgcaggtgaacctgccccacgtgaccgcgagcttctctgtcttccgcccgtcttcctaccacatcatggtgagcatggccattggcgtccggctgcaggtgcagctggccccagtcatgcaactctttgtgacactggaccaggcctcccaggggcaggtgcagggcctctgcgggaacttcaacggcctggaaggtgacgacttcaagacggccagcgggctggtggaggccacgggggccggctttgccaacacctggaaggcacagtcaacctgccatgacaagctggactggttggacgatccctgctccctgaacatcgagagcgccaactacgccgagcactggtgctccctcctgaagaagacagagaccccctttggcaggtgccactcggctgtggaccctgctgagtattacaagaggtgcaaatatgacacgtgtaactgtcagaacaatgaggactgcctgtgcgccgccctgtcctcctacgcgcgcgcctgcaccgccaagggcgtcatgctgtggggctggcgggagcatgtctgcaacaaggatgtgggctcctgccccaactcgcaggtcttcctgtacaacctgaccacctgccagcagacctgccgctccctctccgaggccgacagccactgtctcgagggctttgcgcctgtggacggctgcggctgccctgaccacaccttcctggacgagaagggccgctgcgtacccctggccaagtgctcctgttaccaccgcggtctctacctggaggcgggggatgtggtcgtcaggcaggaagaacgatgtgtgtgccgggatgggcggctgcactgtaggcagatccggctgatcggccagagctgcacggccccaaagatccacatggactgcagcaacctgactgcactggccacctcgaagccccgagccctcagctgccagacgctggccgccggctattaccacacagagtgtgtcagtggctgtgtgtgccccgacgggctgatggatgacggccggggtggctgcgtggtggagaaggaatgcccttgcgtccataacaacgacctgtattcttccggcgccaagatcaaggtggactgcaatacctgcacctgcaagagaggacgctgggtgtgcacccaggctgtgtgccatggcacctgctccatttacgggagtggccactacatcacctttgatgggaagtactacgactttgacggacactgctcctacgtggctgttcaggactactgcggccagaactcctcactgggctcattcagcatcatcaccgagaacgtcccctgtggcactacgggcgtcacctgctccaaggccatcaagatcttcatggggaggacggagctgaagttggaagacaagcaccgtgtggtgatccagcgtgatgagggtcaccacgtggcctacaccacgcgggaggtgggccagtacctggtggtggagtccagcacgggcatcatcgtcatctgggacaagaggaccaccgtgttcatcaagctggctccctcctacaagggcaccgtgtgtggcctgtgtgggaactttgaccaccgctccaacaacgacttcaccacgcgggaccacatggtggtgagcagcgagctggacttcgggaacagctggaaggaggcccccacctgcccagatgtgagcaccaaccccgagccctgcagcctgaacccgcaccgccgctcctgggccgagaagcagtgcagcatcctcaaaagcagcgtgttcagcatctgccacagcaaggtggaccccaagcccttctacgaggcctgtgtgcacgactcgtgctcctgtgacacgggtggggactgtgagtgcttctgctctgccgtggcctcctacgcccaggagtgtaccaaagagggggcctgcgtgttctggaggacgccggacctgtgccccatattctgcgactactacaaccctccgcatgagtgtgagtggcactatgagccatgtgggaaccggagcttcgagacctgcaggaccatcaacggcatccactccaacatctccgtgtcctacctggagggctgctacccccggtgccccaaggacaggcccatctatgaggaggatctgaagaagtgtgtcactgcagacaagtgtggctgctatgtcgaggacacccactacccacctggagcatcggttcccaccgaggagacctgcaagtcctgcgtgtgtaccaactcctcccaagtcgtctgcaggccggaggaaggaaagattcttaaccagacccaggatggcgccttctgctactgggagatctgtggccccaacgggacggtggagaagcacttcaacatctgttccattacgacacgcccgtccaccctgaccaccttcaccaccatcaccctccccaccacccccacctccttcaccactaccaccaccaccaccaccccgacctccagcacagttttatcaacaactccgaagctgtgctgcctctggtctgactggatcaatgaggaccaccccagcagtggcagcgacgacggtgaccgagaaccatttgatggggtctgcggggcccctgaggacatcgagtgcaggtcggtcaaggatccccacctcagcttggagcagcatggccagaaggtgcagtgtgatgtctctgttgggttcatttgcaagaatgaagaccagtttggaaatggaccatttggactgtgttacgactacaagatacgtgtcaattgttgctggcccatggataagtgtatcaccactcccagccctccaactaccactcccagccctccaccaaccacgacgaccacccttccaccaaccaccacccccagccctccaaccaccaccacaaccacccctccaccaaccaccacccccagccctccaataaccaccacgaccacccctctaccaaccaccactcccagccctccaataagcaccacaaccacccctccaccaaccaccactcccagccctccaaccaccactcccagccctccaaccaccactcccagccctccaacaaccaccacaaccacccctccaccaaccaccactcccagccctccaatgactacgcccatcactccaccagccagcactaccacccttccaccaaccaccactcccagccctccaacaaccaccacaaccacccctccaccaaccaccactcccagtcctccaacgactacgcccatcactccaccaaccagcactactacccttccaccaaccaccactcccagccctccaccaaccaccacaaccacccctccaccaaccaccactcccagccctccaacaaccaccactcccagtcctccaacaatcaccacaaccacccctccaccaaccaccactcccagccctccaacaacgaccacaaccacccctccaccaaccaccactcccagccctccaacgactacacccatcactccaccaaccagcactaccacccttccaccaaccaccactcccagccctccaccaaccaccacaaccacccctccaccaaccaccactcccagccctccaacaaccaccactcccagccctccaataaccaccacaaccacccctccaccaaccaccactcccagctctccaataaccaccactcccagccctccaacaaccaccatgaccaccccttcaccaaccaccacccccagctctccaataaccaccacaaccaccccttcctcaactaccactcccagccctccaccaaccaccatgaccaccccttcaccaaccaccactcccagccctccaacaaccaccatgaccacccttccaccaaccaccacttccagccctctaacaactactcctctacctccatcaataactcctcctacattttcaccattctcaacgacaacccctactaccccatgcgtgcctctctgcaattggactggctggctggattctggaaaacccaactttcacaaaccaggtggagacacagaattgattggagacgtctgtggaccaggctgggcagctaacatctcttgcagagccaccatgtatcctgatgttcccattggacagcttggacaaacagtggtgtgtgatgtctctgtggggctgatatgcaaaaatgaagaccaaaagccaggtggggtcatccctatggccttctgcctcaactacgagatcaacgttcagtgctgtgagtgtgtcacccaacccaccaccatgacaaccaccaccacagagaacccaactccgccaaccacgacacccatcaccaccaccactacggtgaccccaaccccaacacccaccggcacacagaccccaaccacgacacccatcaccaccaccactacggtgaccccaaccccaacacccaccggcacacagaccccaaccacgacacccatcaccaccaccactacggtgaccccaaccccaacacccaccggcacacagaccccaaccacgacacccatcaccaccaccactacggtgaccccaaccccaacacccaccggcacacagaccccaaccacgacacccatcaccaccaccactacggtgaccccaaccccaacacccaccggcacacagaccccaaccacgacacccatcaccaccaccactacggtgaccccaaccccaacacccaccggcacacagaccccaaccacgacacccatcaccaccaccactacggtgaccccaaccccaacacccaccggcacacagaccccaaccacgacacccatcaccaccaccactacggtgaccccaaccccaacacccaccggcacacagaccccaaccacgacacccatcaccaccaccactacggtgaccccaaccccaacacccaccggcacacagaccccaaccacgacacccatcaccaccaccactacggtgaccccaaccccaacacccaccggcacacagaccccaaccacgacacccatcaccaccaccactacggtgaccccaaccccaacacccaccggcacacagaccccaaccacgacacccatcaccaccaccactacggtgaccccaaccccaacacccaccggcacacagaccccaaccacgacacccatcaccaccaccactacggtgaccccaaccccaacacccaccggcacacagaccccaaccacgacacccatcaccaccaccactacggtgaccccaaccccaacacccaccggcacacagaccccaaccacgacacccatcaccaccaccactacggtgaccccaaccccaacacccaccggcacacagaccccaaccacgacacccatcaccaccaccactacggtgaccccaaccccaacacccaccggcacacagaccccaaccacgacacccatcaccaccaccactacggtgaccccaaccccaacacccaccggcacacagaccccaaccacgacacccatcaccaccaccactacggtgaccccaaccccaacacccaccggcacacagaccccaaccacgacacccatcaccaccaccactacggtgaccccaaccccaacacccaccggcacacagaccccaaccacgacacccatcaccaccaccactacggtgaccccaaccccaacacccaccggcacacagaccccaaccacgacacccatcaccaccaccactacggtgaccccaaccccaacacccaccggcacacagaccccaaccacgacacccatcaccaccaccactacggtgaccccaaccccaacacccaccggcacacagaccccaaccacgacacccatcaccaccaccactacggtgaccccaaccccaacacccaccggcacacagaccccaaccacgacacccatcaccaccaccactacggtgaccccaaccccaacacccaccggcacacagaccccaaccacgacacccatcaccaccaccactacggtgaccccaaccccaacacccaccggcacacagaccccaaccacgacacccatcaccaccaccactacggtgaccccaaccccaacacccaccggcacacagaccccaaccacgacacccatcaccaccaccactacggtgaccccaaccccaacacccaccggcacacagaccccaaccacgacacccatcaccaccaccactacggtgaccccaaccccaacacccaccggcacacagaccccaaccacgacacccatcaccaccaccactacggtgaccccaaccccaacacccaccggcacacagaccccaaccacgacacccatcaccaccaccactacggtgaccccaaccccaacacccaccggcacacagaccccaaccacgacacccatcaccaccaccactacggtgaccccaaccccaacacccaccggcacacagaccccaaccacgacacccatcaccaccaccactacggtgaccccaaccccaacacccaccggcacacagaccccaaccacgacacccatcaccaccaccactacggtgaccccaaccccaacacccaccggcacacagaccccaaccacgacacccatcaccaccaccactacggtgaccccaaccccaacacccaccggcacacagaccccaaccacgacacccatcaccaccaccactacggtgaccccaaccccaacacccaccggcacacagaccccaaccacgacacccatcaccaccaccactacggtgaccccaaccccaacacccaccggcacacagaccccaaccacgacacccatcaccaccaccactacggtgaccccaaccccaacacccaccggcacacagaccccaaccacgacacccatcaccaccaccactacggtgaccccaaccccaacacccaccggcacacagaccccaaccacgacacccatcaccaccaccactacggtgaccccaaccccaacacccaccggcacacagaccccaaccacgacacccatcaccaccaccactacggtgaccccaaccccaacacccaccggcacacagaccccaaccacgacacccatcaccaccaccactacggtgaccccaaccccaacacccaccggcacacagaccccaaccacgacacccatcaccaccaccactacggtgaccccaaccccaacacccaccggcacacagaccccaaccacgacacccatcaccaccaccactacggtgaccccaaccccaacacccaccggcacacagaccccaaccacgacacccatcaccaccaccactacggtgaccccaaccccaacacccaccggcacacagaccccaaccacgacacccatcaccaccaccactacggtgaccccaaccccaacacccaccggcacacagaccccaaccacgacacccatcaccaccaccactacggtgaccccaaccccaacacccaccggcacacagaccccaaccacgacacccatcaccaccaccactacggtgaccccaaccccaacacccaccggcacacagaccccaaccacgacacccatcaccaccaccactacggtgaccccaaccccaacacccaccggcacacagaccccaaccacgacacccatcaccaccaccactacggtgaccccaaccccaacacccaccggcacacagaccccaaccacgacacccatcaccaccaccactacggtgaccccaaccccaacacccaccggcacacagaccccaaccacgacacccatcaccaccaccactacggtgaccccaaccccaacacccaccggcacacagaccccaaccacgacacccatcaccaccaccactacggtgaccccaaccccaacacccaccggcacacagaccccaaccacgacacccatcaccaccaccactacggtgaccccaaccccaacacccaccggcacacagaccccaaccacgacacccatcaccaccaccactacggtgaccccaaccccaacacccaccggcacacagaccccaaccacgacacccatcaccaccaccactacggtgaccccaaccccaacacccaccggcacacagaccccaaccacgacacccatcaccaccaccactacggtgaccccaaccccaacacccaccggcacacagaccccaaccacgacacccatcaccaccaccactacggtgaccccaaccccaacacccaccggcacacagaccccaaccacgacacccatcaccaccaccactacggtgaccccaaccccaacacccaccggcacacagaccccaaccacgacacccatcaccaccaccactacggtgaccccaaccccaacacccaccggcacacagaccccaaccacgacacccatcaccaccaccactacggtgaccccaaccccaacacccaccggcacacagaccccaaccacgacacccatcaccaccaccactacggtgaccccaaccccaacacccaccggcacacagaccccaaccacgacacccatcaccaccaccactacggtgaccccaaccccaacacccaccggcacacagaccccaaccacgacacccatcaccaccaccactacggtgaccccaaccccaacacccaccggcacacagaccccaaccacgacacccatcaccaccaccactacggtgaccccaaccccaacacccaccggcacacagaccccaaccacgacacccatcaccaccaccactacggtgaccccaaccccaacacccaccggcacacagaccccaaccacgacacccatcaccaccaccactacggtgaccccaaccccaacacccaccggcacacagaccccaaccacgacacccatcaccaccaccactacggtgaccccaaccccaacacccaccggcacacagaccccaaccacgacacccatcaccaccaccactacggtgaccccaaccccaacacccaccggcacacagaccccaaccacgacacccatcaccaccaccactacggtgaccccaaccccaacacccaccggcacacagaccccaaccacgacacccatcaccaccaccactacggtgaccccaaccccaacacccaccggcacacagaccccaaccacgacacccatcaccaccaccactacggtgaccccaaccccaacacccaccggcacacagaccccaaccacgacacccatcaccaccaccactacggtgaccccaaccccaacacccaccggcacacagaccccaaccacgacacccatcaccaccaccactacggtgaccccaaccccaacacccaccggcacacagaccccaaccacgacacccatcaccaccaccactacggtgaccccaaccccaacacccaccggcacacagaccccaaccacgacacccatcaccaccaccactacggtgaccccaaccccaacacccaccggcacacagaccccaaccacgacacccatcaccaccaccactacggtgaccccaaccccaacacccaccggcacacagaccccaaccacgacacccatcaccaccaccactacggtgaccccaaccccaacacccaccggcacacagaccccaaccacgacacccatcaccaccaccactacggtgaccccaaccccaacacccaccggcacacagaccccaaccacgacacccatcaccaccaccactacggtgaccccaaccccaacacccaccggcacacagaccccaaccacgacacccatcaccaccaccactacggtgaccccaaccccaacacccaccggcacacagaccccaaccacgacacccatcaccaccaccactacggtgaccccaaccccaacacccaccggcacacagaccccaaccacgacacccatcaccaccaccactacggtgaccccaaccccaacacccaccggcacacagaccccaaccacgacacccatcaccaccaccactacggtgaccccaaccccaacacccaccggcacacagaccccaaccacgacacccatcaccaccaccactacggtgaccccaaccccaacacccaccggcacacagaccccaaccacgacacccatcaccaccaccactacggtgaccccaaccccaacacccaccggcacacagaccccaaccacgacacccatcaccaccaccactacggtgaccccaaccccaacacccaccggcacacagaccccaaccacgacacccatcaccaccaccactacggtgaccccaaccccaacacccaccggcacacagaccccaaccacgacacccatcaccaccaccactacggtgaccccaaccccaacacccaccggcacacagaccccaaccacgacacccatcaccaccaccactacggtgaccccaaccccaacacccaccggcacacagaccccaaccacgacacccatcaccaccaccactacggtgaccccaaccccaacacccaccggcacacagaccccaaccacgacacccatcaccaccaccactacggtgaccccaaccccaacacccaccggcacacagaccccaaccacgacacccatcaccaccaccactacggtgaccccaaccccaacacccaccggcacacagaccccaaccacgacacccatcaccaccaccactacggtgaccccaaccccaacacccaccggcacacagaccccaaccacgacacccatcaccaccaccactacggtgaccccaaccccaacacccaccggcacacagaccccaaccacgacacccatcaccaccaccactacggtgaccccaaccccaacacccaccggcacacagaccccaaccacgacacccatcaccaccaccactacggtgaccccaaccccaacacccaccggcacacagaccccaaccacgacacccatcaccaccaccactacggtgaccccaaccccaacacccaccggcacacagaccccaaccacgacacccatcaccaccaccactacggtgaccccaaccccaacacccaccggcacacagaccccaaccacgacacccatcaccaccaccactacggtgaccccaaccccaacacccaccggcacacagaccccaaccacgacacccatcaccaccaccactacggtgaccccaaccccaacacccaccggcacacagaccgggccccccacccacacaagcacagcaccgattgctgagttgaccacatccaatcctccgcctgagtcctcaacccctcagacctctcggtccacctcttcccctctcacggagtcaaccacccttctgagtaccctaccacctgccattgagatgaccagcacggccccaccctccacacccacggcacccacgaccacgagcggaggccacacactgtctccaccgcccagcaccaccacgtcccctccaggcacccccactcgcggtaccacgaccgggtcatcttcagcccccacccccagcactgtgcagacgaccaccaccagtgcctggaccccaacgccgaccccactctccacacccagcatcatcaggaccacaggcctgaggccctacccttcctctgtgcttatctgctgtgtcctgaacgacacctactacgcaccaggtgaggaggtgtacaacggcacatacggagacacctgttatttcgtcaactgctcactgagctgtacgttggagttctataactggtcctgcccatccacgccctccccaacacccacgccctccaagtcgacgcccacgccttccaagccatcgtccacgccctccaagccgacgcccggcaccaagccccccgagtgcccagactttgatcctcccagacaggagaacgagacttggtggctgtgcgactgcttcatggccacgtgcaagtacaacaacacggtggagatcgtgaaggtggagtgtgagccgccgcccatgcccacctgctccaacggcctccaacccgtgcgcgtcgaggaccccgacggctgctgctggcactgggagtgcgactgctactgcacgggctggggcgacccgcactatgtcaccttcgacggactctactacagctaccagggcaactgcacctacgtgctggtggaggagatcagcccctccgtggacaacttcggagtttacatcgacaactaccactgcgatcccaacgacaaggtgtcctgtccccgcaccctcatcgtgcgccacgagacccaggaggtgctgatcaagaccgtgcatatgatgcccatgcaggtgcaggtgcaggtgaacaggcaggcggtggcactgccctacaagaagtacgggctggaggtgtaccagtctggcatcaactacgtggtggacatccccgagctgggtgtcctcgtctcctacaatggcctgtccttctccgtcaggctgccctaccaccggtttggcaacaacaccaagggccagtgtggcacctgcaccaacaccacctccgacgactgcattctgcccagcggggagatcgtctccaactgtgaggctgcggctgaccagtggctggtgaacgacccctccaagccacactgcccccacagcagctccacgaccaagcgcccggccgtcactgtgcccgggggcggtaaaacgaccccacacaaggactgcaccccatctcccctctgccagctcatcaaggacagcctgtttgcccagtgccacgcactggtgcccccgcagcactactacgatgcctgcgtgttcgacagctgcttcatgccgggctcgagcctggagtgcgccagtctgcaggcctacgcagccctctgtgcccagcagaacatctgcctcgactggcggaaccacacgcatggggcctgcttggtggagtgcccatctcacagggagtaccaggcctgtggccctgcagaagagcccacgtgcaaatccagctcctcccagcagaacaacacagtcctggtggaaggctgcttctgtcctgagggcaccatgaactacgctcctggctttgatgtctgcgtgaagacctgcggctgtgtgggacctgacaatgtgcccagagagtttggggagcacttcgagttcgactgcaagaactgtgtctgcctggagggtggaagtggcatcatctgccaacccaagaggtgcagccagaagcccgttacccactgcgtggaagacggcacctacctcgccacggaggtcaaccctgccgacacctgctgcaacattaccgtctgcaagtgcaacaccagcctgtgcaaagagaagccctccgtgtgcccgctgggattcgaagtgaagagcaagatggtgcctggaaggtgctgtcccttctactggtgtgagtccaagggggtgtgtgttcacgggaatgctgagtaccagcccggttctccagtttattcctccaagtgccaggactgcgtgtgcacggacaaggtggacaacaacaccctgctcaacgtcatcgcctgcacccacgtgccctgcaacacctcctgcagccctggcttcgaactcatggaggcccccggggagtgctgtaagaagtgtgaacagacgcactgtatcatcaaacggcccgacaaccagcacgtcatcctgaagcccggggacttcaagagcgacccgaagaacaactgcacattcttcagctgcgtgaagatccacaaccagctcatctcgtccgtctccaacatcacctgccccaactttgatgccagcatttgcatcccgggctccatcacattcatgcccaatggatgctgcaagacctgcacccctcgcaatgagaccagggtgccctgctccaccgtccccgtcaccacggaggtttcgtacgccggctgcaccaagaccgtcctcatgaatcattgctccgggtcctgcgggacatttgtcatgtactcggccaaggcccaggccctggaccacagctgctcctgctgcaaagaggagaaaaccagccagcgtgaggtggtcctgagctgccccaatggcggctcgctgacacacacctacacccacatcgagagctgccagtgccaggacaccgtctgcgggctccccaccggcacctcccgccgggcccggcgctcccctaggcatctggggagcgggtgagcggggtgggcacagcccccttcactgccctcgacagctttacctcccccggaccctctgagcctcctaagctcggcttcctctcttcagatatttattgtctgagtctttgttcagtccttgctttccaataataaactcagggggacatgc

SEQ ID NO: 1059 - protein, 440 aa, Homo sapiens [sequence omitted]

SEQ ID NO: 1060 - protein, 230 aa, Homo sapiens
MNEMYLRCDHENQYAQWMAACMLASKGKTMADSSYQPEVLNILSFLRMKNRNSASQVASSLENMDMNPECFVSPRCAKRHKSKQLAARILEAHQNVAQMPLVEAKLRFIQAWQSLPEFGLTYYLVRFKGSKKDDILGVSYNRLIKIDAATGIPVTTWRFTNIKQWNVNWETRQVVIEFDQNVFTAFTCLSADCKIVHEYIGGYIFLSTRSKDQNETLDEDLFHKLTGGQD

SEQ ID NO: 1061 - protein, 311 aa, Homo sapiens
MYVSYLLDKDVSMYPSSVRHSGGLNLAPQNFVSPPQYPDYGGYHVAAAAAAQNLDSAQSPGPSWPAAYGAPLREDWNGYAPGGAAAANAVAHALNGGSPAAAMGYSSPADYHPHHHPHHHPHHPAAAPSCASGLLQTLNPGPPGPAATAAAEQLSPGGQRRNLCEWMRKPAQQSLGSQVKTRTKDKYRVVYTDHQRLELEKEFHYSRYITIRRKAELAATLGLSERQVKIWFQNRRAKERKINKKKLQQQQQQQPPQPPPPPPQPPQPQPGPLRSVPEPLSPVSSLQASVSGSVPGVLGPTGGVLNPTVTQ

SEQ ID NO: 1062 - protein, 237 aa, Homo sapiens
MAGVSACIKYSMFTFNFLFWLCGILILALAIWVRVSNDSQAIFGSEDVGSSSYVAVDILIAVGAIIMILGFLGCCGAIKESRCMLLLFFIGLLLILLLQVATGILGAVFKSKSDRIVNETLYENTKLLSATGESEKQFQEAIIVFQEEFKCCGLVNGAADWGNNFQHYPELCACLDKQRPCQSYNGKQVYKETCISFIKDFLAKNLIIVIGISFGLAVIEILGLVFSMVLYCQIGNK

SEQ ID NO: 1063 - protein, 80 aa, Homo sapiens
MAARALCMLGLVLALLSSSSAEEYVGLSANQCAVPAKDRVDCGYPHVTPKECNNRGCCFDSRIPGVPWCFKPLQEAECTF

SEQ ID NO: 1064 - protein, 323 aa, Homo sapiens
MAYVPAPGYQPTYNPTLPYYQPIPGGLNVGMSVYIQGVASEHMKRFFVNFVVGQDPGSDVAFHFNPRFDGWDKVVFNTLQGGKWGSEERKRSMPFKKGAAFELVFIVLAEHYKVVVNGNPFYEYGHRLPLQMVTHLQVDGDLQLQSINFIGGQPLRPQGPPMMPPYPGPGHCHQQLNSLPTMEGPPTFNPPVPYFGRLQGGLTARRTIIIKGYVPPTGKSFAINFKVGSSGDIALHINPRMGNGTVVRNSLLNGSWGSEEKKITHNPFGPGQFFDLSIRCGLDRFKVYANGQHLFDFAHRLSAFQRVDTLEIQGDVTLSYVQI

SEQ ID NO: 1065 - protein, 957 aa, Homo sapiens
RNRPHTTAFPGSTTMPGVSQESTASHSSPGSTDTTLSPGSTTASSLGPESTTFHSGPGSTETTLLPDNTTASGLLEASTPVHSSTGSPHTTLSPAGSTTRQGESTTFQSWPNSKDTTPAPPTTTSAFVELSTTSHGSPSSTPTTHFSASSTTLGRSEESTTVHSSPVATATTPSPARSTTSGLVEESTTYHSSPGSTQTMHFPESDTTSGRGEESTTSHSSTTHTISSAPSTTSALVEEPTSYHSSPGSTATTHFPDSSTTSGRSEESTASHSNQDATGTIVLPARSTTSVLLGESTTSPISSGSMETTALPGSTTTPGLSEKSTTFHSSPRSPATTLSPASTTSSGVSEESTTSHSRPGSTHTTAFPDSTTTPGLSRHSTTSHSSPGSTDTTLLPASTTTSGPSQESTTSHSSPGSTDTALSPGSTTALSFGQESTTFHSSPGSTHTTLFPDSTTSSGIVEASTRVHSSTGSPRTTLSPASSTSPGLQGESTAFQTHPASTHTTPSTPSTATAPVEESTTYHRSPSSTPTTHFPASSTTSGHSEKSTIFHSSPDASGTTPSSAHSTTSGRGESTTSRISPGSTEITTLPGSTTTPGLSEASTTFYSSPRSPTTTLSPASMTSLGVGEESTTSRSQPGSTHSTVSPASTTTPGLSEESTTVYSSSPGSTETTVFPRSTTTSVRGEEPTTFHSRPASTHTTLFTEDSTTSGLTEESTAFPGSPASTQTGLPATLTTADLGEESTTFPSSSGSTGTTLSPARSTTSGLVGESTPSRLSPSSTETTTLPGSPTTPSLSEKSTTFYTSPRSPDATLSPATTTSSGVSEESSTSHSQPGSTHTTAFPDSTTTSGLSQEPKTSHSSQGSTEATLSPGSTTASSLGQQSTTFHSSPGDTETTLLPDDTITSGLVEASTPTHSSTGSLHTTLTPASSTSAGLQEESTTFQSWPSSSDTTPSPPGP

SEQ ID NO: 1066 - protein, 914 aa, Homo sapiens
MGPFKSSVFILILHLLEGALSNSLIQLNNNGYEGIVVAIDPNVPEDETLIQQIKDMVTQASLYLFEATGKRFYFKNVAILIPETWKTKADYVRPKLETYKNADVLVAESTPPGNDEPYTEQMGNCGEKGERIHLTPDFIAGKKLAEYGPQGKAFVHEWAHLRWGVFDEYNNDEKFYLSNGRIQAVRCSAGITGTNVVKKCQGGSCYTKRCTFNKVTGLYEKGCEFVLQSRQTEKASIMFAQHVDSIVEFCTEQNHNKEAPNKQNQKCNLRSTWEVIRDSEDFKKTTPMTTQPPNPTFSLLQIGQRIVCLVLDKSGSMATGNRLNRLNQAGQLFLLQTVELGSWVGMVTFDSAAHVQSELIQINSGSDRDTLAKRLPAAASGGTSICSGLRSAFTVIRKKYPTDGSEIVLLTDGEDNTISGCFNEVKQSGAIIHTVALGPSAAQELEELSKMTGGLQTYASDQVQNNGLIDAFGALSSGNGAVSQRSIQLESKGLTLQNSQWMNGTVIVDSTVGKDTLFLITWTTQPPQILLWDPSGQKQGGFVVDKNTKMAYLQIPGIAKVGTWKYSLQASSQTLTLTVTSRASNATLPPITVTSKTNKDTSKFPSPLVVYANIRQGASPILRASVTALIESVNGKTVTLELLDNGAGADATKDDGVYSRYFTTYDTNGRYSVKVRALGGVNAARRRVIPQQSGALYIPGWIENDEIQWNPPRPEINKDDVQHKQVCFSRTSSGGSFVASDVPNAPIPDLFPPGQITDLKAEIHGGSLINLTWTAPGDDYDHGTAHKYIIRISTSILDLRDKFNESLQVNTTALIPKEANSEEVFLFKPENITFENGTDLFIAIQAVDKVDLKSEISNIARVSLFIPPQTPPETPSPDETSAPCPNIHINSTIPGIHILKIMWKWIGELQLSIA

SEQ ID NO: 1067 - protein, 585 aa, Homo sapiens
TLSPASMRSSSISGEPTSLYSQAESTHTTAFPASTTTSGLSQESTTFHSKPGSTETTLSPGSITTSSFAQEFTTPHSQPGSALSTVSPASTTVPGLSEESTTFYSSPGSTETTAFSHSNTMSIHSQQSTPFPDSPGFTHTVLPATLTTTDIGQESTAFHSSSDATGTTPLPARSTASDLVGEPTTFYISPSPTYTTLFPASSSTSGLTEESTTFHTSPSFTSTIVSTESLETLAPGLCQEGQIWNGKQCVCPQGYVGYQCLSPLESFPVETPEKLNATLGMTVKVTYRNFTEKMNDASSQEYQNFSTLFKNRMDVVLKGDNLPQYRGVNIRRLLNGSIVVKNDVILEADYTLEYEELFENLAEIVKAKIMNETRTTLLDPDSCRKAILCYSEEDTFVDSSVTPGFDFQEQCTQKAAEGYTQFYYVDVLDGKLACVNKCTKGTKSQMNCNLGTCQLQRSGPRCLCPNTNTHWYWGETCEFNIAKSLVYGIVGAVMAVLLLALIILIILFSLSQRKRHREQYDVPQEWRKEGTPGIFQKTAIWEDQNLRESRFGLENAYNNFRPTLETVDSGTELHIQRPEMVASTV

SEQ ID NO: 1068 - protein, 5179 aa, Homo sapiens
MGLPLARLAAVCLALSLAGGSELQTEGRTRYHGRNVCSTWGNFHYKTFDGDVFRFPGLCDYNFASDCRGSYKEFAVHLKRGPGQAEAPAGVESILLTIKDDTIYLTRHLAVLNGAVVSTPHYSPGLLIEKSDAYTKVYSRAGLTLMWNREDALMLELDTKFRNHTCGLCGDYNGLQSYSEFLSDGVLFSPLEFGNMQKINQPDVVCEDPEEEVAPASCSEHRAECERLLTAEAFADCQDLVPLEPYLRACQQDRCRCPGGDTCVCSTVAEFSRQCSHAGGRPGNWRTATLCPKTCPGNLVYLESGSPCMDTCSHLEVSSLCEEHRMDGCFCPEGTVYDDIGDSGCVPVSQCHCRLHGHLYTPGQEITNDCEQCVCNAGRWVCKDLPCPGTCALEGGSHITTFDGKTYTFHGDCYYVLAKGDHNDSYALLGELAPCGSTDKQTCLKTVVLLADKKKNAVVFKSDGSVLLNQLQVNLPHVTASFSVFRPSSYHIMVSMAIGVRLQVQLAPVMQLFVTLDQASQGQVQGLCGNFNGLEGDDFKTASGLVEATGAGFANTWKAQSTCHDKLDWLDDPCSLNIESANYAEHWCSLLKKTETPFGRCHSAVDPAEYYKRCKYDTCNCQNNEDCLCAALSSYARACTAKGVMLWGWREHVCNKDVGSCPNSQVFLYNLTTCQQTCRSLSEADSHCLEGFAPVDGCGCPDHTFLDEKGRCVPLAKCSCYHRGLYLEAGDVVVRQEERCVCRDGRLHCRQIRLIGQSCTAPKIHMDCSNLTALATSKPRALSCQTLAAGYYHTECVSGCVCPDGLMDDGRGGCVVEKECPCVHNNDLYSSGAKIKVDCNTCTCKRGRWVCTQAVCHGTCSIYGSGHYITFDGKYYDFDGHCSYVAVQDYCGQNSSLGSFSIITENVPCGTTGVTCSKAIKIFMGRTELKLEDKHRVVIQRDEGHHVAYTTREVGQYLVVESSTGIIVIWDKRTTVFIKLAPSYKGTVCGLCGNFDHRSNNDFTTRDHMVVSSELDFGNSWKEAPTCPDVSTNPEPCSLNPHRRSWAEKQCSILKSSVFSICHSKVDPKPFYEACVHDSCSCDTGGDCECFCSAVASYAQECTKEGACVFWRTPDLCPIFCDYYNPPHECEWHYEPCGNRSFETCRTINGIHSNISVSYLEGCYPRCPKDRPIYEEDLKKCVTADKCGCYVEDTHYPPGASVPTEETCKSCVCTNSSQVVCRPEEGKILNQTQDGAFCYWEICGPNGTVEKHFNICSITTRPSTLTTFTTITLPTTPTSFTTTTTTTTPTSSTVLSTTPKLCCLWSDWINEDHPSSGSDDGDREPFDGVCGAPEDIECRSVKDPHLSLEQHGQKVQCDVSVGFICKNEDQFGNGPFGLCYDYKIRVNCCWPMDKCITTPSPPTTTPSPPPTTTTTLPPTTTPSPPTTTTTTPPPTTTPSPPITTTTTPLPTTTPSPPISTTTTPPPTTTPSPPTTTPSPPTTTPSPPTTTTTTPPPTTTPSPPMTTPITPPASTTTLPPTTTPSPPTTTTTTPPPTTTPSPPTTTPITPPTSTTTLPPTTTPSPPPTTTTTPPPTTTPSPPTTTTPSPPTITTTTPPPTTTPSPPTTTTTTPPPTTTPSPPTTTPITPPTSTTTLPPTTTPSPPPTTTTTPPPTTTPSPPTTTTPSPPITTTTTPPPTTTPSSPITTTPSPPTTTMTTPSPTTTPSSPITTTTTPSSTTTPSPPPTTMTTPSPTTTPSPPTTTMTTLPPTTTSSPLTTTPLPPSITPPTFSPFSTTTPTTPCVPLCNWTGWLDSGKPNFHKPGGDTELIGDVCGPGWAANISCRATMYPDVPIGQLGQTVVCDVSVGLICKNEDQKPGGVIPMAFCLNYEINVQCCECVTQPTTMTTTTTENPTPPTTTPITTTTTVTPTPTPTGTQTPTTTPITTTTTVTPTPTPTGTQTPTTTPITTTTTVTPTPTPTGTQTPTTTPITTTTTVTPTPTPTGTQTPTTTPITTTTTVTPTPTPTGTQTPTTTPITTTTTVTPTPTPTGTQTPTTTPITTTTTVTPTPTPTGTQTPTTTPITTTTTVTPTPTPTGTQTPTTTPITTTTTVTPTPTPTGTQTPTTTPITTTTTVTPTPTPTGTQTPTTTPITTTTTVTPTPTPTGTQTPTTTPITTTTTVTPTPTPTGTQTPTTTPITTTTTVTPTPTPTGTQTPTTTPITTTTTVTPTPTPTGTQTPTTTPITTTTTVTPTPTPTGTQTPTTTPITTTTTVTPTPTPTGTQTPTTTPITTTTTVTPTPTPTGTQTPTTTPITTTTTVTPTPTPTGTQTPTTTPITTTTTVTPTPTPTGTQTPTTTPITTTTTVTPTPTPTGTQTPTTTPITTTTTVTPTPTPTGTQTPTTTPITTTTTVTPTPTPTGTQTPTTTPITTTTTVTPTPTPTGTQTPTTTPITTTTTVTPTPTPTGTQTPTTTPITTTTTVTPTPTPTGTQTPTTTPITTTTTVTPTPTPTGTQTPTTTPITTTTTVTPTPTPTGTQTPTTTPITTTTTVTPTPTPTGTQTPTTTPITTTTTVTPTPTPTGTQTPTTTPITTTTTVTPTPTPTGTQTPTTTPITTTTTVTPTPTPTGTQTPTTTPITTTTTVTPTPTPTGTQTPTTTPITTTTTVTPTPTPTGTQTPTTTPITTTTTVTPTPTPTGTQTPTTTPITTTTTVTPTPTPTGTQTPTTTPITTTTTVTPTPTPTGTQTPTTTPITTTTTVTPTPTPTGTQTPTTTPITTTTTVTPTPTPTGTQTPTTTPITTTTTVTPTPTPTGTQTPTTTPITTTTTVTPTPTPTGTQTPTTTPITTTTTVTPTPTPTGTQTPTTTPITTTTTVTPTPTPTGTQTPTTTPITTTTTVTPTPTPTGTQTPTTTPITTTTTVTPTPTPTGTQTPTTTPITTTTTVTPTPTPTGTQTPTTTPITTTTTVTPTPTPTGTQTPTTTPITTTTTVTPTPTPTGTQTPTTTPITTTTTVTPTPTPTGTQTPTTTPITTTTTVTPTPTPTGTQTPTTTPITTTTTVTPTPTPTGTQTPTTTPITTTTTVTPTPTPTGTQTPTTTPITTTTTVTPTPTPTGTQTPTTTPITTTTTVTPTPTPTGTQTPTTTPITTTTTVTPTPTPTGTQTPTTTPITTTTTVTPTPTPTGTQTPTTTPITTTTTVTPTPTPTGTQTPTTTPITTTTTVTPTPTPTGTQTPTTTPITTTTTVTPTPTPTGTQTPTTTPITTTTTVTPTPTPTGTQTPTTTPITTTTTVTPTPTPTGTQTPTTTPITTTTTVTPTPTPTGTQTPTTTPITTTTTVTPTPTPTGTQTPTTTPITTTTTVTPTPTPTGTQTPTTTPITTTTTVTPTPTPTGTQTPTTTPITTTTTVTPTPTPTGTQTPTTTPITTTTTVTPTPTPTGTQTPTTTPITTTTTVTPTPTPTGTQTPTTTPITTTTTVTPTPTPTGTQTPTTTPITTTTTVTPTPTPTGTQTPTTTPITTTTTVTPTPTPTGTQTPTTTPITTTTTVTPTPTPTGTQTPTTTPITTTTTVTPTPTPTGTQTPTTTPITTTTTVTPTPTPTGTQTPTTTPITTTTTVTPTPTPTGTQTPTTTPITTTTTVTPTPTPTGTQTPTTTPITTTTTVTPTPTPTGTQTPTTTPITTTTTVTPTPTPTGTQTPTTTPITTTTTVTPTPTPTGTQTPTTTPITTTTTVTPTPTPTGTQTPTTTPITTTTTVTPTPTPTGTQTPTTTPITTTTTVTPTPTPTGTQTPTTTPITTTTTVTPTPTPTGTQTPTTTPITTTTTVTPTPTPTGTQTPTTTPITTTTTVTPTPTPTGTQTPTTTPITTTTTVTPTPTPTGTQTPTTTPITTTTTVTPTPTPTGTQTPTTTPITTTTTVTPTPTPTGTQTPTTTPITTTTTVTPTPTPTGTQTPTTTPITTTTTVTPTPTPTGTQTPTTTPITTTTTVTPTPTPTGTQTPTTTPITTTTTVTPTPTPTGTQTPTTTPITTTTTVTPTPTPTGTQTPTTTPITTTTTVTPTPTPTGTQTPTTTPITTTTTVTPTPTPTGTQTPTTTPITTTTTVTPTPTPTGTQTPTTTPITTTTTVTPTPTPTGTQTPTTTPITTTTTVTPTPTPTGTQTPTTTPITTTTTVTPTPTPTGTQTPTTTPITTTTTVTPTPTPTGTQTPTTTPITTTTTVTPTPTPTGTQTGPPTHTSTAPIAELTTSNPPPESSTPQTSRSTSSPLTESTTLLSTLPPAIEMTSTAPPSTPTAPTTTSGGHTLSPPPSTTTSPPGTPTRGTTTGSSSAPTPSTVQTTTTSAWTPTPTPLSTPSIIRTTGLRPYPSSVLICCVLNDTYYAPGEEVYNGTYGDTCYFVNCSLSCTLEFYNWSCPSTPSPTPTPSKSTPTPSKPSSTPSKPTPGTKPPECPDFDPPRQENETWWLCDCFMATCKYNNTVEIVKVECEPPPMPTCSNGLQPVRVEDPDGCCWHWECDCYCTGWGDPHYVTFDGLYYSYQGNCTYVLVEEISPSVDNFGVYIDNYHCDPNDKVSCPRTLIVRHETQEVLIKTVHMMPMQVQVQVNRQAVALPYKKYGLEVYQSGINYVVDIPELGVLVSYNGLSFSVRLPYHRFGNNTKGQCGTCTNTTSDDCILPSGEIVSNCEAAADQWLVNDPSKPHCPHSSSTTKRPAVTVPGGGKTTPHKDCTPSPLCQLIKDSLFAQCHALVPPQHYYDACVFDSCFMPGSSLECASLQAYAALCAQQNICLDWRNHTHGACLVECPSHREYQACGPAEEPTCKSSSSQQNNTVLVEGCFCPEGTMNYAPGFDVCVKTCGCVGPDNVPREFGEHFEFDCKNCVCLEGGSGIICQPKRCSQKPVTHCVEDGTYLATEVNPADTCCNITVCKCNTSLCKEKPSVCPLGFEVKSKMVPGRCCPFYWCESKGVCVHGNAEYQPGSPVYSSKCQDCVCTDKVDNNTLLNVIACTHVPCNTSCSPGFELMEAPGECCKKCEQTHCIIKRPDNQHVILKPGDFKSDPKNNCTFFSCVKIHNQLISSVSNITCPNFDASICIPGSITFMPNGCCKTCTPRNETRVPCSTVPVTTEVSYAGCTKTVLMNHCSGSCGTFVMYSAKAQALDHSCSCCKEEKTSQREVVLSCPNGGSLTHTYTHIESCQCQDTVCGLPTGTSRRARRSPRHLGSG

SEQ ID NO: 1069 - DNA, 1173 bp, Homo sapiens
cagccagagacaggggaggagggaagaaggatactgtggaaagggatggcggggcaaacatttagagctagaagccacgactgggaccactggagacactgaagaaggcaggggcccttagagtcttggttgccaaacagatttgcagatcaaggagaacccaggagtttcaaagaagcgctagtaaggtctctgagatccttgcactagctacatcctcagggtaggaggaagatggcttccagaagcatgcggctgctcctattgctgagctgcctggccaaaacaggagtcctgggtgatatcatcatgagacccagctgtgctcctggatggttttaccacaagtccaattgctatggttacttcaggaagctgaggaactggtctgatgccgagctcgagtgtcagtcttacggaaacggagcccacctggcatctatcctgagtttaaaggaagccagcaccatagcagagtacataagtggctatcagagaagccagccgatatggattggcctgcacgacccacagaagaggcagcagtggcagtggattgatggggccatgtatctgtacagatcctggtctggcaagtccatgggtgggaacaagcactgtgctgagatgagctccaataacaactttttaacttggagcagcaacgaatgcaacaagcgccaacacttcctgtgcaagtaccgaccatagagcaagaatcaagattctgctaactcctgcacagccccgtcctcttcctttctgctagcctggctaaatctgctcattatttcagaggggaaacctagcaaactaagagtgataagggccctactacactggcttttttaggcttagagacagaaactttagcattggcccagtagtggcttctagctctaaatgtttgccccgccatccctttccacagtatccttcttccctcctcccctgtctctggctgtctcgagcagtctagaagagtgcatctccagcctatgaaacagctgggtctttggccataagaagtaaagatttgaagacagaaggaagaaactcaggagtaagcttctagcccccttcagcttctacacccttctgccctctctccattgcctgcaccccaccccagccactcaactcctgcttgtttttcctttggccatgggaaag

SEQ ID NO: 1070 - protein, 158 aa, Homo sapiens
MASRSMRLLLLLSCLAKTGVLGDIIMRPSCAPGWFYHKSNCYGYFRKLRNWSDAELECQSYGNGAHLASILSLKEASTIAEYISGYQRSQPIWIGLHDPQKRQQWQWIDGAMYLYRSWSGKSMGGNKHCAEMSSNNNFLTWSSNECNKRQHFLCKYRP

SEQ ID NO: 1071 - DNA, 1114 bp, Homo sapiens
gcacgaggccaaacagatttgcagatcaaggagaacccaggagtttcaaagaagcgctagtaaggtctctgagatccttgcactagctacatcctcagggtaggaggaagatggcttccagaagcatgcggctgctcctattgctgagctgcctggccaaaacaggagtcctgggtgatatcatcatgagacccagctgtgctcctggatggttttaccacaagtccaattgctatggttacttcaggaagctgaggaactggtctgatgccgagctcgagtgtcagtcttacggaaacggagcccacctggcatctatcctgagtttaaaggaagccagcaccatagcagagtacataagtggctatcagagaagccagccgatatggattggcctgcacgacccacagaagaggcagcagtggcagtggattgatggggccatgtatctgtacagatcctggtctggcaagtccatgggtgggaacaagcactgtgctgagatgagctccaataacaactttttaacttggagcagcaacgaatgcaacaagcgccaacacttcctgtgcaagtaccgaccatagagcaagaatcaagattctgctaactcctgcacagccccgtcctcttcctttctgctagcctggctaaatctgctcattatttcagaggggaaacctagcaaactaagagtgataagggccctactacactggcttttttaggcttagagacagaaactttagcattggcccagtagtggcttctagctctaaatgtttgccccgccatccctttccacagtatccttcttccctcctcccctgtctctggctgtctcgagcagtctagaagagtgcatctccagcctatgaaacagctgggtctttggccataagaagtaaagatttgaagacagaaggaagaaactcaggagtaagcttctagaccccttcagcttctacacccttctgccctctctccattgcctgcaccccaccccagccactcaactcctgcttgtttttcctttggccataggaaggtttaccagtagaatccttgctaggttgatgtgggccatacattcctttaataaaccattgtgtac

SEQ ID NO: 1072 - DNA, 1152 bp, Homo sapiens
actggagacactgaagaaggcaggggcccttagagtcttggttgccaaacagatttgcagatcaaggagaacccaggagtttcaaagaagcgctagtaaggtctctgagatccttgcactagctacatcctcagggtaggaggaagatggcttccagaagcatgcggctgctcctattgctgagctgcctggccaaaacaggagtcctgggtgatatcatcatgagacccagctgtgctcctggatggttttaccacaagtccaattgctatggttacttcaggaagctgaggaactggtctgatgccgagctcgagtgtcagtcttacggaaacggagcccacctggcatctatcctgagtttaaaggaagccagcaccatagcagagtacataagtggctatcagagaagccagccgatatggattggcctgcacgacccacagaagaggcagcagtggcagtggattgatggggccatgtatctgtacagatcctggtctggcaagtccatgggtgggaacaagcactgtgctgagatgagctccaataacaactttttaacttggagcagcaacgaatgcaacaagcgccaacacttcctgtgcaagtaccgaccatagagcaagaatcaagattctgctaactcctgcacagccccgtcctcttcctttctgctagcctggctaaatctgctcattatttcagaggggaaacctagcaaactaagagtgataagggccctactacactggcttttttaggcttagagacagaaactttagcattggcccagtagtggcttctagctctaaatgtttgccccgccatccctttccacagtatccttcttccctcctcccctgtctctggctgtctcgagcagtctagaagagtgcatctccagcctatgaaacagctgggtctttggccataagaagtaaagatttgaagacagaaggaagaaactcaggagtaagcttctagcccccttcagcttctacacccttctgccctctctccattgcctgcaccccaccccagccactcaactcctgcttgtttttcctttggccatgggaaggtttaccagtagaatccttgctaggttgatgtgggccatacattcctttaataaaccattgtgtacat

SEQ ID NO: 1073 - DNA, 474 bp, Homo sapiens
atggcttccagaagcatgcggctgctcctattgctgagctgcctggccaaaacaggagtcctgggtgatatcatcatgagacccagctgtgctcctggatggttttaccacaagtccaattgctatggttacttcaggaagctgaggaactggtctgatgccgagctcgagtgtcagtcttacggaaacggagcccacctggcatctatcctgagtttaaaggaagccagcaccatagcagagtacataagtggctatcagagaagccagccgatatggattggcctgcacgacccacagaagaggcagcagtggcagtggattgatggggccatgtatctgtacagatcctggtctggcaagtccatgggtgggaacaagcactgtgctgagatgagctccaataacaactttttaacttggagcagcaacgaatgcaacaagcgccaacacttcctgtgcaagtaccgacca

SEQ ID NO: 1074 - DNA, 1114 bp, Homo sapiens; identical to SEQ ID NO: 1071

SEQ ID NO: 1075 - DNA, 614 bp, Homo sapiens
tgaagaaggcaggggcccttagagtcttggttgccaaacagatttgcagatcaaggagaacccaggagtttcaaagaagcgctagtaaggtctctgagatccttgcactagctacatcctcagggtaggaggaagatggcttccagaagcatgcggctgctcctattgctgagctgcctggccaaaacaggagtcctgggtgatatcatcatgagacccagctgtgctcctggatggttttaccacaagtccaattgctatggttacttcaggaagctgaggaactggtctgatgccgagctcgagtgtcagtcttacggaaacggagcccacctggcatctatcctgagtttaaaggaagccagcaccatagcagagtacataagtggctatcagagaagccagccgatatggattggcctgcacgacccacagaagaggcagcagtggcagtggattgatggggccatgtatctgtacagatcctggtctggcaagtccatgggtgggaacaagcactgtgctgagatgagctccaataacaactttttaacttggagcagcaacgaatgcaacaagcgccaacacttcctgtgcaagtaccgaccatagag

SEQ ID NO: 1076 - DNA, 3345 bp, Homo sapiens
gaattccgtctcgaccactgaatggaagaaaaggacttttaaccaccattttgtgacttacagaaaggaatttgaataaagaaaactatgatacttcaggcccatcttcactccctgtgtcttcttatgctttatttggcaactggatatggccaagaggggaagtttagtggacccctgaaacccatgacattttctatttatgaaggccaagaaccgagtcaaattatattccagtttaaggccaatcctcctgctgtgacttttgaactaactggggagacagacaacatatttgtgatagaacgggagggacttctgtattacaacagagccttggacagggaaacaagatctactcacaatctccaggttgcagccctggacgctaatggaattatagtggagggtccagtccctatcaccatagaagtgaaggacatcaacgacaatcgacccacgtttctccagtcaaagtacgaaggctcagtaaggcagaactctcgcccaggaaagcccttcttgtatgtcaatgccacagacctggatgatccggccactcccaatggccagctttattaccagattgtcatccagcttcccatgatcaacaatgtcatgtactttcagatcaacaacaaaacgggagccatctctcttacccgagagggatctcaggaattgaatcctgctaagaatccttcctataatctggtgatctcagtgaaggacatgggaggccagagtgagaattccttcagtgataccacatctgtggatatcatagtgacagagaatatttggaaagcaccaaaacctgtggagatggtggaaaactcaactgatcctcaccccatcaaaatcactcaggtgcggtggaatgatcccggtgcacaatattccttagttgacaaagagaagctgccaagattcccattttcaattgaccaggaaggagatatttacgtgactcagcccttggaccgagaagaaaaggatgcatatgttttttatgcagttgcaaaggatgagtacggaaaaccactttcatatccgctggaaattcatgtaaaagttaaagatattaatgataatccacctacatgtccgtcaccagtaaccgtatttgaggtccaggagaatgaacgactgggtaacagtatcgggacccttactgcacatgacagggatgaagaaaatactgccaacagttttctaaactacaggattgtggagcaaactcccaaacttcccatggatggactcttcctaatccaaacctatgctggaatgttacagttagctaaacagtccttgaagaagcaagatactcctcagtacaacttaacgatagaggtgtctgacaaagatttcaagaccctttgttttgtgcaaatcaacgttattgatatcaatgatcagatccccatctttgaaaaatcagattatggaaacctgactcttgctgaagacacaaacattgggtccaccatcttaaccatccaggccactgatgctgatgagccatttactgggagttctaaaattctgtatcatatcataaagggagacagtgagggacgcctgggggttgacacagatccccataccaacaccggatatgtcataattaaaaagcctcttgattttgaaacagcagctgtttccaacattgtgttcaaagcagaaaatcctgagcctctagtgtttggtgtgaagtacaatgcaagttcttttgccaagttcacgcttattgtgacagatgtgaatgaagcacctcaattttcccaacacgtattccaagcgaaagtcagtgaggatgtagctataggcactaaagtgggcaatgtgactgccaaggatccagaaggtctggacataagctattcactgaggggagacacaagaggttggcttaaaattgaccacgtgactggtgagatctttagtgtggctccattggacagagaagccggaagtccatatcgggtacaagtggtggccacagaagtaggggggtcttccttaagctctgtgtcagagttccacctgatccttatggatgtgaatgacaaccctcccaggctagccaaggactacacgggcttgttcttctgccatcccctcagtgcacctggaagtctcattttcgaggctactgatgatgatcagcacttatttcggggtccccattttacattttccctcggcagtggaagcttacaaaacgactgggaagtttccaaaatcaatggtactcatgcccgactgtctaccaggcacacagactttgaggagagggcgtatgtcgtcttgatccgcatcaatgatgggggtcggccacccttggaaggcattgtttctttaccagttacattctgcagttgtgtggaaggaagttgtttccggccagcaggtcaccagactgggatacccactgtgggcatggcagttggtatactgctgaccacccttctggtgattggtataattttagcagttgtgtttatccgcataaagaaggataaaggcaaagataatgttgaaagtgctcaagcatctgaagtcaaacctctgagaagctgaatttgaaaaggaatgtttgaatttatatagcaagtgctatttcagcaacaaccatctcatcctattacttttcatctaacgtgcattataattttttaaacagatattccctcttgtcctttaatatttgctaaatatttcttttttgaggtggagtcttgctctgtcgcccaggctggagtacagtggtgtgatcccagctcactgcaacctccgcctcctgggttcacatgattctcctgcctcagcttcctaagtagctgggtttacaggcacccaccaccatgcccagctaatttttgtatttttaatagagacggggtttcgccatttggccaggctggtcttgaactcctgacgtcaagtgatctgcctgccttggtctcccaatacaggcatgaaccactgcacccacctacttagatatttcatgtgctatagacattagagagatttttcatttttccatgacatttttcctctctgcaaatggcttagctacttgtgtttttcccttttggggcaagacagactcattaaatattctgtacattttttctttatcaaggagatatatcagtgttgtctcatagaactgcctggattccatttatgttttttctgattccatcctgtgtccccttcatccttgactcctttggtatttcactgaatttcaaacatttgtcagagaagaaaaaagtgaggactcaggaaaaataaataaataaaagaacagccttttgcggccgcgaattc

SEQ ID NO: 1077 - protein, 158 aa, Homo sapiens; identical to SEQ ID NO: 1070

SEQ ID NO: 1078 - protein, 158 aa, Homo sapiens; identical to SEQ ID NO: 1070

SEQ ID NO: 1079 - protein, 158 aa, Homo sapiens; identical to SEQ ID NO: 1070

SEQ ID NO: 1080 - protein, 158 aa, Homo sapiens; identical to SEQ ID NO: 1070

SEQ ID NO: 1081 - protein, 832 aa, Homo sapiens [sequence omitted]

SEQ ID NO: 1082 - DNA, 265 bp, Homo sapiens
gaaacatggactgccccttaaattttgactgtcctaaaaacctatttctgatttataatatgctgcctgataaagtgacactagatgtaccagctgagtgtttaatcttcccatcacagatcagatttgagcattaacaggtattttcacatacttgacttcaatatgcttaaagtgaggaacaagcaattaagtggggactaaaaatgttggcctttaagcaatttgtcataaatcttcacaataaagaataaatcaatgtttt

SEQ ID NO: 1083 - protein, 44 aa, Homo sapiens
NMDCPLNFDCPKNLFLIYNMLPDKVTLDVPAECLIFPSQIRFEH

SEQ ID NO: 1084 - DNA, 1035 bp, Homo sapiens
atgcatcaccatcaccatcacacggccgcgtccgataacttccagctgtcccagggtgggcagggattcgccattccgatcgggcaggcgatggcgatcgcgggccagatcaagcttcccaccgttcatatcgggcctaccgccttcctcggcttgggtgttgtcgacaacaacggcaacggcgcacgagtccaacgcgtggtcgggagcgctccggcggcaagtctcggcatctccaccggcgacgtgatcaccgcggtcgacggcgctccgatcaactcggccaccgcgatggcggacgcgcttaacgggcatcatcccggtgacgtcatctcggtgacctggcaaaccaagtcgggcggcacgcgtacagggaacgtgacattggccgagggacccccggccgaattcatatgggtacgagtaagcaatgactctcaagcaatttttggttctgaagatgtaggctctagctcctacgttgctgtggacatattgattgctgtaggtgccatcatcatgattctgggcttcctgggatgctgcggtgctataaaagaaagtcgctgcatgcttctgttgtttttcataggcttgcttctgatcctgctcctgcaggtggcgacaggtatcctaggagctgttttcaaatctaagtctgatcgcattgtgaatgaaactctctatgaaaacacaaagcttttgagcgccacaggggaaagtgaaaaacaattccaggaagccataattgtgtttcaagaagagtttaaatgctgcggtttggtcaatggagctgctgattggggaaataattttcaacactatcctgaattatgtgcctgtctagataagcagagaccatgccaaagctataatggaaaacaagtttacaaagagacctgtatttctttcataaaagacttcttggcaaaaaatttgattatagttattggaatatcatttggactggcagttattgagatactgggtttggtgttttctatggtcctgtattgccagatcgggaacaaataa

SEQ ID NO: 1085 - protein, 344 aa, Homo sapiens
MHHHHHHTAASDNFQLSQGGQGFAIPIGQAMAIAGQIKLPTVHIGPTAFLGLGVVDNNGNGARVQRVVGSAPAASLGISTGDVITAVDGAPINSATAMADALNGHHPGDVISVTWQTKSGGTRTGNVTLAEGPPAEFIWVRVSNDSQAIFGSEDVGSSSYVAVDILIAVGAIIMILGFLGCCGAIKESRCMLLLFFIGLLLILLLQVATGILGAVFKSKSDRIVNETLYENTKLLSATGESEKQFQEAIIVFQEEFKCCGLVNGAADWGNNFQHYPELCACLDKQRPCQSYNGKQVYKETCISFIKDFLAKNLIIVIGISFGLAVIEILGLVFSMVLYCQIGNK

SEQ ID NO: 1086 - DNA, 2877 bp, Homo sapiens
atgcatcaccatcaccatcacacggccgcgtccgataacttccagctgtcccagggtgggcagggattcgccattccgatcgggcaggcgatggcgatcgcgggccagatcaagcttcccaccgttcatatcgggcctaccgccttcctcggcttgggtgttgtcgacaacaacggcaacggcgcacgagtccaacgcgtggtcgggagcgctccggcggcaagtctcggcatctccaccggcgacgtgatcaccgcggtcgacggcgctccgatcaactcggccaccgcgatggcggacgcgcttaacgggcatcatcccggtgacgtcatctcggtgacctggcaaaccaagtcgggcggcacgcgtacagggaacgtgacattggccgagggacccccggccgaattctccatggagctcgctagcggatccgcggccgcacaagaggggaagtttagtggacccctgaaacccatgacattttctatttatgaaggccaagaaccgagtcaaattatattccagtttaaggccaatcctcctgctgtgacttttgaactaactggggagacagacaacatatttgtgatagaacgggagggacttctgtattacaacagagccttggacagggaaacaagatctactcacaatctccaggttgcagccctggacgctaatggaattatagtggagggtccagtccctatcaccatagaagtgaaggacatcaacgacaatcgacccacgtttctccagtcaaagtacgaaggctcagtaaggcagaactctcgcccaggaaagcccttcttgtatgtcaatgccacagacctggatgatccggccactcccaatggccagctttattaccagattgtcatccagcttcccatgatcaacaatgtyatgtactttcagatcaacaacaaaacgggagccatctctcttacccgagagggatctcaggaattgaatcctgctaagaatccttcctataatctggtgatctcagtgaaggacatgggaggccagagtgagaattccttcagtgataccacatctgtggatatcatagtgacagagaatatttggaaagcaccaaaacctgtggagatggtggaaaactcaactgatcctcaccccatcaaaatcactcaggtgcggtggaatgatcccggtgcacaatattccttagttgacaaagagaagctgccaagattcccattttcaattgaccaggaaggagatatttacgtgactcagcccttggaccgagaagaaaaggatgcatatgttttttatgcagttgcaaaggatgagtacggaaaaccactttcatatccgctggaaattcatgtaaaagttaaagatattaatgataatccacctacatgtccgtcaccagtaaccgtatttgaggtccaggagaatgaacgactgggtaacagtatcgggacccttactgcacatgacagggatgaagaaaatactgccaacagttttctaaactacaggattgtggagcaaactcccaaacttcccatggatggactcttcctaatccaaacctatgctggaatgttacagttagctaaacagtccttgaagaagcaagatactcctcagtacaacttaacgatagaggtgtctgacaaagatttcaagaccctttgttttgtgcaaatcaacgttattgatatcaatgatcagatccccatctttgaaaaatcagattatggaaacctgactcttgctgaagacacaaacattgggtccaccatcttaaccatccaggccactgatgctgatgagccatttactgggagttctaaaattctgtatcatatcataaagggagacagtgagggacgcctgggggttgacacagatccccataccaacaccggatatgtcataattaaaaagcctcttgattttgaaacagcagctgtttccaacattgtgttcaaagcagaaaatcctgagcctctagtgtttggtgtgaagtacaatgcaagttcttttgccaagttcacgcttattgtgacagatgtgaatgaagcacctcaattttcccaacacgtattccaagcgaaagtcagtgaggatgtagctataggcactaaagtgggcaatgtgactgccaaggatccagaaggtctggacataagctattcactgaggggagacacaagaggttggcttaaaattgaccacgtgactggtgagatctttagtgtggctccattggacagagaagccggaagtccatatcgggtacaagtggtggccacagaagtaggggggtcttccttaagctctgtgtcagagttccacctgatccttatggatgtgaatgacaaccctcccaggctagccaaggactacacgggcttgttcttctgccatcccctcagtgcacctggaagtctcattttcgaggctactgatgatgatcagcacttatttcggggtccccattttacattttccctcggcagtggaagcttacaaaacgactgggaagtttccaaaatcaatggtactcatgcccgactgtctaccaggcacacagactttgaggagagggcgtatgtcgtcttgatccgcatcaatgatgggggtcggccacccttggaaggcattgtttctttaccagttacattctgcagttgtgtggaaggaagttgtttccggccagcaggtcaccagactgggatacccactgtgggcatggcagttggtatactgctgaccacccttctggtgattggtataattttagcagttgtgtttatccgcataaagaaggataaaggcaaagataatgttgaaagtgctcaagcatctgaagtcaaacctctgagaagctga

SEQ ID NO: 1087 - protein, 958 aa, Homo sapiens
MHHHHHHTAASDNFQLSQGGQGFAIPIGQAMAIAGQIKLPTVHIGPTAFLGLGVVDNNGNGARVQRVVGSAPAASLGISTGDVITAVDGAPINSATAMADALNGHHPGDVISVTWQTKSGGTRTGNVTLAEGPPAEFSMELASGSAAAQEGKFSGPLKPMTFSIYEGQEPSQIIFQFKANPPAVTFELTGETDNIFVIEREGLLYYNRALDRETRSTHNLQVAALDANGIIVEGPVPITIEVKDINDNRPTFLQSKYEGSVRQNSRPGKPFLYVNATDLDDPATPNGQLYYQIVIQLPMINNVMYFQINNKTGAISLTREGSQELNPAKNPSYNLVISVKDMGGQSENSFSDTTSVDIIVTENIWKAPKPVEMVENSTDPHPIKITQVRWNDPGAQYSLVDKEKLPRFPFSIDQEGDIYVTQPLDREEKDAYVFYAVAKDEYGKPLSYPLEIHVKVKDINDNPPTCPSPVTVFEVQENERLGNSIGTLTAHDRDEENTANSFLNYRIVEQTPKLPMDGLFLIQTYAGMLQLAKQSLKKQDTPQYNLTIEVSDKDFKTLCFVQINVIDINDQIPIFEKSDYGNLTLAEDTNIGSTILTIQATDADEPFTGSSKILYHIIKGDSEGRLGVDTDPHTNTGYVIIKKPLDFETAAVSNIVFKAENPEPLVFGVKYNASSFAKFTLIVTDVNEAPQFSQHVFQAKVSEDVAIGTKVGNVTAKDPEGLDISYSLRGDTRGWLKIDHVTGEIFSVAPLDREAGSPYRVQVVATEVGGSSLSSVSEFHLILMDVNDNPPRLAKDYTGLFFCHPLSAPGSLIFEATDDDQHLFRGPHFTFSLGSGSLQNDWEVSKINGTHARLSTRHTDFEERAYVVLIRINDGGRPPLEGIVSLPVTFCSCVEGSCFRPAGHQTGIPTVGMAVGILLTTLLVIGIILAVVFIRIKKDKGKDNVESAQASEVKPLRS

SEQ ID NO: 1088 - DNA, 33 bp, Artificial Sequence
  Primer
cgagcgaattcatatgggtacgagtaagcaatg

SEQ ID NO: 1089 - DNA, 33 bp, Artificial Sequence
  Primer
gcgatgcctcgagttatttgttcccgatctggc

SEQ ID NO: 1090 - DNA, 37 bp, Artificial Sequence
  Primer
gcatgcatgcggccgcacaagaggggaagtttagtgg

SEQ ID NO: 1091 - DNA, 37 bp, Artificial Sequence
  Primer
gcgatgcctcgagtcagcttctcagaggtttgacttc

SEQ ID NO: 1092 - DNA, 2864 bp, Homo sapiens
gattaccaagcaagaacagctaaaatgaaagccatcattcatcttactcttcttgctctcctttctgtaaacacagccaccaaccaaggcaactcagctgatgctgtaacaaccacagaaactgcgactagtggtcctacagtagctgcagctgataccactgaaactaatttccctgaaactgctagcaccacagcaaatacaccttctttcccaacagctacttcacctgctccccccataattagtacacatagttcctccacaattcctacacctgctccccccataattagtacacatagttcctccacaattcctatacctactgctgcagacagtgagtcaaccacaaatgtaaattcattagctacctctgacataatcaccgcttcatctccaaatgatggattaatcacaatggttccttctgaaacacaaagtaacaatgaaatgtcccccaccacagaagacaatcaatcatcagggcctcccactggcaccgctttattggagaccagcaccctaaacagcacaggtcccagcaatccttgccaagatgatccctgtgcagataattcgttatgtgttaagctgcataatacaagtttttgcctgtgtttagaagggtattactacaactcttctacatgtaagaaaggaaaggtattccctgggaagatttcagtgacagtatcagaaacatttgacccagaagagaaacattccatggcctatcaagacttgcatagtgaaattactagcttgtttaaagatgtatttggcacatctgtttatggacagactgtaattcttactgtaagcacatctctgtcaccaagatctgaaatgcgtgctgatgacaagtttgttaatgtaacaatagtaacaattttggcagaaaccacaagtgacaatgagaagactgtgactgagaaaattaataaagcaattagaagtagctcaagcaactttctaaactatgatttgacccttcggtgtgattattatggctgtaaccagactgcggatgactgcctcaatggtttagcatgcgattgcaaatctgacctgcaaaggcctaacccacagagccctttctgcgttgcttccagtctcaagtgtcctgatgcctgcaacgcacagcacaagcaatgcttaataaagaagagtggtggggcccctgagtgtgcgtgcgtgcccggctaccaggaagatgctaatgggaactgccaaaagtgtgcatttggctacagtggactcgactgtaaggacaaatttcagctgatcctcactattgtgggcaccatcgctggcattgtcattctcagcatgataattgcattgattgtcacagcaagatcaaataacaaaacgaagcatattgaagaagagaacttgattgacgaagactttcaaaatctaaaactgcggtcgacaggcttcaccaatcttggagcagaagggagcgtctttcctaaggtcaggataacggcctccagagacagccagatgcaaaatccctattcaagacacagcagcatgccccgccctgactattagaatcataagaatgtggaacccgccatggcccccaaccaatgtacaagctattatttagagtgtttagaaagactgatggagaagtgagcaccagtaaagatctggcctccggggtttttcttccatctgacatctgccagcctctctgaatggaagttgtgaatgtttgcaacgaatccagctcacttgctaaataagaatctatgacattaaatgtagtagatgctattagcgcttgtcagagaggtggttttcttcaatcagtacaaagtactgagacaatggttagggttgttttcttaattcttttcctggtagggcaacaagaaccatttccaatctagaggaaagctccccagcattgcttgctcctgggcaaacattgctcttgagttaagtgacctaattcccctgggagacatacgcatcaactgtggaggtccgaggggatgagaagggatacccaccacctttcaagggtcacaagctcactctctgacaagtcagaatagggacactgcttctatccctccaatggagagattctggcaacctttgaacagcccagagcttgcaacctagcctcacccaagaagactggaaagagacatatctctcagctttttcaggaggcgtgcctgggaatccaggaactttttgatgctaattagaaggcctggactaaaaatgtccactatggggtgcactctacagtttttgaaatgctaggaggcagaaggggcagagagtaaaaaacatgacctggtagaaggaagagaggcaaaggaaactgggtggggaggatcaattagagaggaggcacctgggatccaccttcttccttaggtcccctcctccatcagcaaaggagcacttctctaatcatgccctcccgaagactggctgggagaaggtttaaaaacaaaaaatccaggagtaagagccttaggtcagtttgaaattggagacaaactgtctggcaaagggtgcgagagggagcttgtgctcaggagtccagccgtccagcctcggggtgtaggtttctgaggtgtgccattggggcctcagccttctctggtgacagaggctcagctgtggccaccaacacacaaccacacacacacaaccacacacacaaatgggggcaaccacatccagtacaagcttttacaaatgttattagtgtccttttttatttctaatgccttgtcctcttaaaagttattttatttgttattattatttgttcttgactgttaattgtgaatggtaatgcaataaagtgcctttgttagatggtg

SEQ ID NO: 1093 - protein, 512 aa, Homo sapiens
MKAIIHLTLLALLSVNTATNQGNSADAVTTTETATSGPTVAAADTTETNFPETASTTANTPSFPTATSPAPPIISTHSSSTIPTPAPPIISTHSSSTIPIPTAADSESTTNVNSLATSDIITASSPNDGLITMVPSETQSNNEMSPTTEDNQSSGPPTGTALLETSTLNSTGPSNPCQDDPCADNSLCVKLHNTSFCLCLEGYYYNSSTCKKGKVFPGKISVTVSETFDPEEKHSMAYQDLHSEITSLFKDVFGTSVYGQTVILTVSTSLSPRSEMRADDKFVNVTIVTILAETTSDNEKTVTEKINKAIRSSSSNFLNYDLTLRCDYYGCNQTADDCLNGLACDCKSDLQRPNPQSPFCVASSLKCPDACNAQHKQCLIKKSGGAPECACVPGYQEDANGNCQKCAFGYSGLDCKDKFQLILTIVGTIAGIVILSMIIALIVTARSNNKTKHIEEENLIDEDFQNLKLRSTGFTNLGAEGSVFPKVRITASRDSQMQNPYSRHSSMPRPDY

SEQ ID NO: 1094 - DNA, 6410 bp, Homo sapiens
acctgcacagtggcgagaccaaggacccagagagaaaggtgagagtgcagccggggaggctgaggatcggcggagctggaagagtgagggtgaaggcaagaagtagagcacagaagcaaagattttaagaggaaagaagacatctgaacccaacaccaccctaaaccacaggctgcagggttggcatgctccgtgcaagaccagaggcactgatgctcctgggagctcttctgactggatccctgggtccatcgggcagtcaggacgcactctcactgccctgggaagtgcagcgctatgacggctggtttaacaacctgaggcaccacgagcgtggtgctgttggctgccggttgcagcgccgcgtaccagccaattacgccgacggtgtgtatcaggctctggaggagccgcagctgcccaacccgcgccggctcagcaacgcagccacgcggggcatagccggcctgccgtcgctccacaaccgcaccgtactgggggtcttctttggctaccatgttctttccgacgtggtgagcgtggaaacgcccggttgccccgccgagttcctcaacatccgcatcccacctggagaccccgtgttcgaccccgaccagcgcggggacgtggtgctgcccttccagaggagccgctgggaccccgagaccggacggagtcccagcaacccccgggacctggccaaccaggtgacgggctggctggacggcagcgccatctatggctcctcgcactcctggagcgacgcgctgcggagcttctcggggggacagctggcgtcggggcccgaccccgctttcccccgagactcgcagaaccccctgctcatgtgggcggcgcccgaccccgccaccgggcagaacgggccccgggggctgtacgccttcggggcagagagagggaaccgggaacccttcctgcaggcgctgggcctgctctggttccgctaccacaacctgtgggcgcagaggctggcccgccagcacccagactgggaggacgaggagctgttccagcacgcacgcaagagggtcatcgccacctaccagaacatcgctgtgtatgagtggctgcccagcttcctgcagaaaacactcccggagtatacaggataccgtcctttcctagaccccagcatctccccggaatttgtggtggcctctgagcagttcttctctaccatggtgccccctggtgtctacatgagaaatgccagctgtcatttccggaaggtcctgaacaagggttttcaaagctcccaagctctcagggtctgcaacaactactggattcgggagaaccccaatctgaacagtacccaggaggtgaatgagctgctgctgggaatggcctcccagatttcggagttggaggacaacatagtggttgaagatctgagggattactggcctggccctggcaaattctcccgtacagactatgtggccagcagcatccaacgtggccgagatatggggctgcccagctatagccaggccctgctggcctttgggctggacatcccaaggaactggagtgatctcaaccctaatgtggacccccaggtgctggaggccacagctgccctgtacaaccaggacctatcccagctagagctgctccttggcgggctcctggagagccatggggaccctggacccctgttcagtgccattgtcctcgaccagtttgtacggctgcgggatggtgaccgctactggtttgagaacaccaggaatgggctgttctccaagaaggagattgaagacatccgaaataccaccctgcgggacgtgctggtcgctgttatcaacattgaccccagtgccctgcagcccaatgtctttgtctggcataaaggtgcaccctgccctcaacctaagcagctcacaactgacggcctgccccagtgtgcacccctgactgtgcttgacttctttgaaggcagcagccctggttttgccatcaccatcattgctctctgctgccttcccttagtgagtctgcttctctctggagtggtggcctatttccggggccgagaacacaagaagctacaaaagaaactcaaagagagcgtgaagaaggaagcagccaaagatggagtgccagcgatggagtggccaggccccaaggagaggagcagtcccatcatcatccagctgctgtcagacaggtgtctgcaggtcctgaacaggcatctcactgtgctccgtgtggtccagctgcagcctctgcagcaggtcaacctcatcctgtccaacaaccgaggatgccgcaccctgctgctcaagatccctaaggagtatgacctggtgctgctgtttagttctgaagaggaacggggcgcctttgtgcagcagctatgggacttctgcgtgcgctgggctctgggcctccatgtggctgagatgagcgagaaggagctatttaggaaggctgtgacaaagcagcagcgggaacgcatcctggagatcttcttcagacacctttttgctcaggtgctggacatcaaccaggccgacgcagggaccctgcccctggactcctcccagaaggtgcgggaggccctgacctgcgagctgagcagggccgagtttgccgagtccctgggcctcaagccccaggacatgtttgtggagtccatgttctctctggctgacaaggatggcaatggctacctgtccttccgagagttcctggacatcctggtggtcttcatgaaaggctccccagaggataagtcccgtctaatgtttaccatgtatgacctggatgagaatggcttcctctccaaggacgaattcttcaccatgatgcgatccttcatcgagatctccaacaactgcctgtccaaggcccagctggccgaggtggtggagtctatgttccgggagtcgggattccaggacaaggaggagctgacatgggaggattttcacttcatgctgcgggaccatgacagcgagctccgcttcacgcagctctgtgtcaaaggtggaggtggaggtggaaatggtattagagatatctttaaacaaaacatcagctgtcgagtctcgttcatcactcggacacctggggagcgctcccacccccagggactggggccccctgccccagaagccccagagctgggaggccctggactgaagaagaggtttggcaaaaaggcagcagtgcccactccccggctgtacacagaggcgctgcaagagaagatgcagcgaggcttcctagcccaaaagctgcagcagtacaagcgcttcgtggagaactaccggaggcacatcgtgtgtgtggcaatcttctcggccatctgtgttggcgtgtttgcagatcgtgcttactactatggctttgccttgccaccctcggacattgcacagaccaccctcgtgggcatcatcctgtcacgaggcacggcggccagcgtctccttcatgttctcttatatcttgctcaccatgtgccgcaacctcataaccttcctgcgagagactttcctcaaccgctatgtgccttttgatgccgcagtggacttccaccgctggatcgccatggctgctgttgtcctggccattttgcacagtgctggccacgcagtcaatgtctacatcttctcagtcagcccactcagcctgctggcctgcatattccccaacgtctttgtgaatgatgggtccaagcttccccagaagttctattggtggttcttccagaccgtcccaggtatgacaggtgtgcttctgctcctggtcctggccatcatgtatgtcttcgcctcccaccacttccgccgccgcagcttccggggcttctggctgacccaccacctctacatcctgctctatgccctgctcatcatccatggcagctatgctctgatccagctgcccactttccacatctacttcctggtcccggcaatcatctatggaggtgacaagctggtgagcctgagccggaagaaggtggagatcagcgtggtgaaggcggagctgctgccctcaggagtgacctacctgcaattccagaggccccaaggctttgagtacaagtcaggacagtgggtgcggatcgcctgcctggctctggggaccaccgagtaccaccccttcacactgacctccgcgccccatgaggacacactcagcctgcacatccgggcagtggggccctggaccactcgcctcagggagatctactcatccccaaagggcaatggctgtgctggatacccaaagctgtaccttgatggaccgtttggagagggccatcaggagtggcataaatttgaggtgtcagtgttggtgggagggggcattggggtcaccccctttgcctccatcctcaaagacctggtcttcaagtcatccttgggcagccaaatgctgtgtaagaagatctacttcatctgggtgacacggacccagcgtcagtttgagtggctggctgacatcatccaagaggtggaggagaacgaccaccaggacctggtgtctgtgcacatttatgtcacccagctggctgagaagttcgacctcaggaccaccatgctatacatctgcgagcggcacttccagaaagtgctgaaccggagtctgttcacgggcctgcgctccatcacccactttggccgtccccccttcgagcccttcttcaactccctgcaggaggtccacccacaggtgcgcaagatcggggtgttcagctgcggccctccaggaatgaccaagaatgtagagaaggcctgtcagctcgtcaacaggcaggaccgagcccacttcatgcaccactatgagaacttctgagcctgtcctccctggctgctgcttccagtatcctgccttctcttctgtgcacctaagttgcccagccctgctggcaatctctccatcagaatccaccttaggcctcagctggagggctgcagagcccctcccaatattgggagaatattgacccagacaattatacaaatgagaaaaggcaggagactatgttctacaattgcagtgcatgatgattataagtccacctgtttatcaacggcaccattcctgcagccctccagacttcctgcccttagcaagtgcgcaaccagtcaggatctcccaaagaagataaagaccactcctcaccccagctcaagccatggcaggcgtggcaagcaaagtggggaggagacagtccctgcttgtgacaagtgtggaggtgaaaaggtacaatagtgcttgtctccgatagctccccacatctctaattgacttccacaaaatcgatgcgttgctttggtatttgcttggactgacatttgagggaggaggaggctgggatcctctggctgagaatctcctcagagcccagtgcagaagctgtgatgcttagaacctggacagcccgactgcctcaactctgtctccaggtctattccctccagctccaaaaggagcagccctacttctaccccttcccgtccccaaagtgtcagcaactttgaggagggcaccaggaaacaaagatgcctccccagccctgatattcttgatgtcaccagtgatacccactgccctgacccctgggcaggcccctctctgcatctactggagtggtccctgggctctggggctgaaggattccagcctctctgccagatattcagtactcgatctcaattcccctcttccacaagagttgggtgaccagctgtcctagtttgcccaggactctccctgttttagcactgaaagtctcttgccccaggaaaccccatcagtcccaggcagattgggacagctggtcaccttacgcaagagccaggctgaaacatcccctccatactcagctctttaacttttcttttcctttttcatcgggctctttcctaaaaagctgagctgtaaaatattttacatcgaggtataataaataatcatgtacatgttttaccaccacccaggtcaagacatagaatgtttcaacatttccatcaccccagaaactccccttgtacccccttccacttcgtctcccctagctcctagaagcaaccactgatgtgatttctaccaaatccagttttggtcctactaaatatactcttttgagactggcctcttttactcaccataatgcctttgtaattcatccatgctgttgtgtgtatcagcagtttgttccttttcattgctgagtagtattctattgtagagatgtaccacagtttgtttattcttctgttgatggacgtttgggttgtttctaattttgaatgattataaataaaaattctgtgagtgttcttgtaaaaaaaaaaaaaaaaaaaaaaaaaaaaaaaaaaaaaaaaaaaaaaaaaaaaaaaaaaaaaaaaaaaaaaaaaaaaaaaaaaa

SEQ ID NO: 1095 - protein, 1548 aa, Homo sapiens
MLRARPEALMLLGALLTGSLGPSGSQDALSLPWEVQRYDGWFNNLRHHERGAVGCRLQRRVPANYADGVYQALEEPQLPNPRRLSNAATRGIAGLPSLHNRTVLGVFFGYHVLSDVVSVETPGCPAEFLNIRIPPGDPVFDPDQRGDVVLPFQRSRWDPETGRSPSNPRDLANQVTGWLDGSAIYGSSHSWSDALRSFSGGQLASGPDPAFPRDSQNPLLMWAAPDPATGQNGPRGLYAFGAERGNREPFLQALGLLWFRYHNLWAQRLARQHPDWEDEELFQHARKRVIATYQNIAVYEWLPSFLQKTLPEYTGYRPFLDPSISPEFVVASEQFFSTMVPPGVYMRNASCHFRKVLNKGFQSSQALRVCNNYWIRENPNLNSTQEVNELLLGMASQISELEDNIVVEDLRDYWPGPGKFSRTDYVASSIQRGRDMGLPSYSQALLAFGLDIPRNWSDLNPNVDPQVLEATAALYNQDLSQLELLLGGLLESHGDPGPLFSAIVLDQFVRLRDGDRYWFENTRNGLFSKKEIEDIRNTTLRDVLVAVINIDPSALQPNVFVWHKGAPCPQPKQLTTDGLPQCAPLTVLDFFEGSSPGFAITIIALCCLPLVSLLLSGVVAYFRGREHKKLQKKLKESVKKEAAKDGVPAMEWPGPKERSSPIIIQLLSDRCLQVLNRHLTVLRVVQLQPLQQVNLILSNNRGCRTLLLKIPKEYDLVLLFSSEEERGAFVQQLWDFCVRWALGLHVAEMSEKELFRKAVTKQQRERILEIFFRHLFAQVLDINQADAGTLPLDSSQKVREALTCELSRAEFAESLGLKPQDMFVESMFSLADKDGNGYLSFREFLDILVVFMKGSPEDKSRLMFTMYDLDENGFLSKDEFFTMMRSFIEISNNCLSKAQLAEVVESMFRESGFQDKEELTWEDFHFMLRDHDSELRFTQLCVKGGGGGGNGIRDIFKQNISCRVSFITRTPGERSHPQGLGPPAPEAPELGGPGLKKRFGKKAAVPTPRLYTEALQEKMQRGFLAQKLQQYKRFVENYRRHIVCVAIFSAICVGVFADRAYYYGFALPPSDIAQTTLVGIILSRGTAASVSFMFSYILLTMCRNLITFLRETFLNRYVPFDAAVDFHRWIAMAAVVLAILHSAGHAVNVYIFSVSPLSLLACIFPNVFVNDGSKLPQKFYWWFFQTVPGMTGVLLLLVLAIMYVFASHHFRRRSFRGFWLTHHLYILLYALLIIHGSYALIQLPTFHIYFLVPAIIYGGDKLVSLSRKKVEISVVKAELLPSGVTYLQFQRPQGFEYKSGQWVRIACLALGTTEYHPFTLTSAPHEDTLSLHIRAVGPWTTRLREIYSSPKGNGCAGYPKLYLDGPFGEGHQEWHKFEVSVLVGGGIGVTPFASILKDLVFKSSLGSQMLCKKIYFIWVTRTQRQFEWLADIIQEVEENDHQDLVSVHIYVTQLAEKFDLRTTMLYICERHFQKVLNRSLFTGLRSITHFGRPPFEPFFNSLQEVHPQVRKIGVFSCGPPGMTKNVEKACQLVNRQDRAHFMHHYENF

SEQ ID NO: 1096 - DNA, 1109 bp, Homo sapiens
ggcacgagggcagctcttctcacaggaccagccactagcgcagcctcgagcgatggcctatgtccccgcaccgggctaccagcccacctacaacccgacgctgccttactaccagcccatcccgggcgggctcaacgtgggaatgtctgtttacatccaaggagtggccagcgagcacatgaagcggttcttcgtgaactttgtggttgggcaggatccgggctcagacgtcgccttccacttcaatccgcggtttgacggctgggacaaggtggtcttcaacacgttgcagggcgggaagtggggcagcgaggagaggaagaggagcatgcccttcaaaaagggtgccgcctttgagctggtcttcatagtcctggctgagcactacaaggtggtggtaaatggaaatcccttctatgagtacgggcaccggcttcccctacagatggtcacccacctgcaagtggatggggatctgcaacttcaatcaatcaacttcatcggaggccagcccctccggccccagggacccccgatgatgccaccttaccctggtcccggacattgccatcaacagctgaacagcctgcccaccatggaaggacccccaaccttcaacccgcctgtgccatatttcgggaggctgcaaggagggctcacagctcgaagaaccatcatcatcaagggctatgtgcctcccacaggcaagagctttgctatcaacttcaaggtgggctcctcaggggacatagctctgcacattaatccccgcatgggcaacggtaccgtggtccggaacagccttctgaatggctcgtggggatccgaggagaagaagatcacccacaacccatttggtcccggacagttctttgatctgtccattcgctgtggcttggatcgcttcaaggtttacgccaatggccagcacctctttgactttgcccatcgcctctcggccttccagagggtggacacattggaaatccagggtgatgtcaccttgtcctatgtccagatctaatctattcctggggccataactcatgggaaaacagaattatcccctaggactcctttctaagcccctaataaaatgtctgagggtg

SEQ ID NO: 1097 - DNA, 3459 bp, Homo sapiens
cagagggctgctggctggctaagtccctcccgctcccggctctcgcctcactaggagcggctctcggtgcagcgggacagggcgaagcggcctgcgcccacggagcgcgcgacactgcccggaagggaccgccacccttgccccctcagctgcccactcgtgatttccagcggcctccgcgcgcgcacgatgccctcggccaccagccacagcgggagcggcagcaagtcgtccggaccgccaccgccgtcgggttcctccgggagtgaggcggccgcgggagccggggccgccgcgccggcttctcagcaccccgcaaccggcaccggcgctgtccagaccgaggccatgaagcagattctcggggtgatcgacaagaaacttcggaacctggagaagaaaaagggtaagcttgatgattaccaggaacgaatgaacaaaggggaaaggcttaatcaagatcagctggatgccgtttctaagtaccaggaagtcacaaataatttggagtttgcaaaagaattacagaggagtttcatggcactaagtcaagatattcagaaaacaataaagaagacagcacgtcgggagcagcttatgagagaagaagctgaacagaaacgtttaaaaactgtacttgagctacagtatgttttggacaaattgggagatgatgaagtgcggactgacctgaaacaaggtttgaatggagtgccaatattgtccgaagaggagttgtcattgttggatgaattctataagctagtagaccctgaacgggacatgagcttgaggttgaatgaacagtatgaacatgcctccattcacctgtgggacctgctggaagggaaggaaaaacctgtatgtggaaccacctataaagttctaaaggaaattgttgagcgtgtttttcagtcaaactactttgacagcacccacaaccaccagaatgggctgtgtgaggaagaagaggcagcctcagcacctgcagttgaagaccaggtacctgaagctgaacctgagccagcagaagagtacactgagcaaagtgaagttgaatcaacagagtatgtaaatagacagttcatggcagaaacacagttcaccagtggtgaaaaggagcaggtagatgagtggacagttgaaacggttgaggtggtaaattcactccagcagcaacctcaggctgcatccccttcagtaccagagccccactctttgactccagtggctcaggcagatccccttgtgagaagacagcgagtacaagaccttatggcacaaatgcagggtccctataatttcatacaggattcaatgctggattttgaaaatcagacacttgatcctgccattgtatctgcacagcctatgaatccaacacaaaacatggacatgccccagctggtttgccctccagttcattctgaatctagacttgctcagcctaatcaagttcctgtacaaccagaagcgacacaggttcctttggtatcatccacaagtgaggggtacacagcatctcaacccttgtaccagccttctcatgctacagagcaacgaccacagaaggaaccaattgatcagattcaggcaacaatctctttaaatacagaccagactacagcatcatcatcccttcctgctgcgtctcagcctcaagtatttcaggctgggacaagcaaacctttacatagcagtggaatcaatgtaaatgcagctccattccaatccatgcaaacggtgttcaatatgaatgccccagttcctcctgttaatgaaccagaaactttaaaacagcaaaatcagtaccaggccagttataaccagagcttttctagtcagcctcaccaagtagaacaaacagagcttcagcaagaacagcttcaaacagtggttggcacttaccatggttccccagaccagtcccatcaagtgactggtaaccaccagcagcctcctcagcagaacactggatttccacgtagcaatcagccctattacaatagtcgtggtgtgtctcgtggaggctcccgtggtgctagaggcttgatgaatggataccggggccctgccaatggattcagaggaggatatgatggttaccgcccttcattctctaacactccaaacagtggttatacacagtctcagttcagtgctccccgggattactctggctatcaacgggatggatatcagcagaatttcaagcgaggctctgggcagagtggaccacggggagccccacgaggtcgtggagggcccccaagacccaacagagggatgccgcaaatgaacactcagcaagtgaattaatctgattcacaggattatgtttaatcgccaaaaacacactggccagtgtaccataatatgttaccagaagagttattatctatttgttctccctttcaggaaacttattgtaaagggactgttttcatcccataaagacaggactacaattgtcagctttctattacctggatatggaaggaaactatttttactctgcatgttctgtcctaagcgtcatcttgagccttgcacatgatactcagattcctcacccttgcttaggagtaaaacaatatactttacagggtgataataatctccatagttatttgaagtggcttgaaaaaggcaagattgacttttatgacattggataaaatctacaaatcagccctcgagttattcaatgataactgacaaactaaattatttccctagaaaggaagatgaaaggagtggagtgtggtttggcagaacaactgcatttcacagcttttccagttaaattggagcactgaacgttcagatgcataccaaattatgcatgggtcctaatcacacatataaggctggctaccagctttgacacagcactgttcatctggccaaacaactgtggttaaaaacacatgtaaaatgctttttaacagctgatactgtataagacaaagccaagatgcaaaattaggctttgattggcactttttgaaaaatatgcaacaaatatgggatgtaatccggatggccgcttctgtacttaatgtgaaatatttagatacctttttgaacacttaacagtttctttgagacaatgacttttgtaaggattggtactatctatcattccttatgacatgtacattgtctgtcactaatccttggattttgctgtattgtcacctaaattggtacaggtactgatgaaaatctctagtggataatcataacactctcggtcacatgtttttccttcagcttgaaagcttttttttaaaaggaaaagataccaaatgcctgctgctaccacccttttcaattgctatcttttgaaaggcaccagtatgtgttttagattgatttccctgtttcagggaaatcacggacagtagtttcagttctgatggtataagcaaaacaaataaaacgtttataaaagtt

SEQ ID NO: 1098 - DNA, 875 bp, Homo sapiens
cgagcggcacgagccgattcctagccgccgactcacacaaggcaggtgggtgaggaaatccagagttgccatggagaaaattccagtgtcagcattcttgctccttgtggccctctcctacactctggccagagataccacagtcaaacctggagccaaaaaggacacaaaggactctcgacccaaactgccccagaccctctccagaggttggggtgaccaactcatctggactcagacatatgaagaagctctatataaatccaagacaagcaacaaacccttgatgattattcatcacttggatgagtgcccacacagtcaagctttaaagaaagtgtttgctgaaaataaagaaatccagaaattggcagagcagtttgtcctcctcaatctggtttatgaaacaactgacaaacacctttctcctgatggccagtatgtccccaggattatgtttgttgacccatctctgacagttagagccgatatcactggaagatattcaaatcgtctctatgcttacgaacctgcagatacagctctgttgcttgacaacatgaagaaagctctcaagttgctgaagactgaattgtaaagaaaaaaaatctccaagcccttctgtctgtcaggccttgagacttgaaaccagaagaagtgtgagaagactggctagtgtggaagcatagtgaacacactgattaggttatggtttaatgttacaacaactattttttaagaaaaacaagttttagaaatttggtttcaagtgtacatgtgtgaaaacaatattgtatactaccatagtgagccatgattttctaaaaaaaaaaataaatgttttgggggtgttctgttttctcccaaaaaaaaaa

SEQ ID NO: 1099 - DNA, 1987 bp, Homo sapiens
ctcgagagctccgccatggccgctctcacccgggacccccagttccagaagctgcagcaatggtaccgcgagcaccgctccgagctgaacctgcgccgcctcttcgatgccaacaaggaccgcttcaaccacttcagcttgaccctcaacaccaaccatgggcatatcctggtggattactccaagaacctggtgacggaggacgtgatgcggatgctggtggacttggccaagtccaggggcgtggaggccgcccgggagcggatgttcaatggtgagaagatcaactacaccgagggtcgagccgtgctgcacgtggctctgcggaaccggtcaaacacacccatcctggtagacggcaaggatgtgatgccagaggtcaacaaggttctggacaagatgaagtctttctgccagcgtgtccggagcggtgactggaaggggtacacaggcaagaccatcacggacgtcatcaacattggcattgtcggctccgacctgggacccctcatggtgactgaagcccttaagccatactcttcaggaggtccccgcgtctggtatgtctccaacattgatggaactcacattgccaaaaccctggcccagctgaacccggagtcctccctgttcatcattgcctccaagacctttactacccaggagaccatcacgaatgcagagacggcgaaggagtggtttctccaggcggccaaggatccttctgcagtggcgaagcactttgttgccctgtctactaacacaaccaaagtgaaggagtttggaattgaccctcaaaacatgttcgagttctgggattgggtgggaggacgctactcgctgtggtcggccatcggactctccattgccctgcacgtgggttttgacaacttcgagcagctgctctcgggggctcactggatggaccagcacttccgcacgacgcccctggagaagaacgcccccgtcttgctggccctgctgggtatctggtacatcaactgctttgggtgtgagacacacgccatgctgccctatgaccagtacctgcaccgctttgctgcgtacttccagcagggcgacatggagtccaatgggaaatacatcaccaaatctggaacccgtgtggaccaccagacaggccccattgtgtggggggagccagggaccaatggccagcatgctttttaccagctcatccaccaaggcaccaagatgataccctgtgacttcctcatcccggtccagacccagcaccccatacggaagggtctgcatcacaagatcctcctggccaacttcttggcccagacagaggccctgatgaggggaaaatcgacggaggaggcccgaaaggagctccaggctgcgggcaagagtccagaggaccttgagaggctgctgccacataaggtctttgaaggaaatcgcccaaccaactctattgtgttcaccaagctcacaccattcatgcttggagccttggtcgccatgtatgagcacaagatcttcgttcagggcatcatctgggacatcaacagctttgaccagtggggagtggagctgggaaagcagctggctaagaaaatagagcctgagcttgatggcagtgctcaagtgacctctcacgacgcttctaccaatgggctcatcaacttcatcaagcagcagcgcgaggccagagtccaataaactcgtgctcatctgcagcctcctctgtgactcccctttctcttctcgtccctcctccccggagccggcactgcatgttcctggacaccacccagagcaccctctggttgtgggcttggaccacgagcccttagcagggaaggctggtctcccccagcctaacccccagcccctccatgtctatgctccctctgtgttagaattggctgaagtgtttttgtgcagctgacttttctgacccatgttcacgttgttcacatcccatgtagaaaaacaaagatgccacggaggaggt

SEQ ID NO: 1100 - DNA, 401 bp, Homo sapiens
ggcagagcgtcagcaagagtacagagagaaactccaagggctgtgtgatctcctcacccagactgaaaaccgcctaattagtaaccaggaagcctttgtgattggagacggcacggtggagttacagaagtaccagtccaagcaagaggaattacagagagatatgcaaggaagtacacaggcaatggaagaaatagtgcgaaacacagaactctttttaaaagagagcggtgacgagttgtcccaagcggatagagctttgattgagcagaaactgaacgaggtgaagatgaagtgtgcgcagctgaacttaaaggctgagcagtcgagaaaggagttggataaggcagtgactacggccctcaaggaggagactgaaaaggttgcagctgtgaggcagc

SEQ ID NO: 1101 - DNA, 2839 bp, Homo sapiens
gcacgagctgcggctccgctctcgtcgcaacgagatctttcgagatcttctccgcccccgctaccggcgcctcctctgcggccactgagccggagccggcctgagcagcgctctcggttgcagtacccactggaaggacttaggcgctcgcgtggacaccgcaagcccctcagtagcctcggcccaagaggcctgctttccactcgctagccccgccggggtccgtgtcctgtctcggtggccggacccgggcccgagcccgagcagtagccggcgccatgtcggtggtgggcatagacctgggcttccagagctgctacgtcgctgtggcccgcgccggcggcatcgagactatcgctaatgagtatagcgaccgctgcacgccggcttgcatttcttttggtcctaagaatcgttcaattggagcagcagctaaaagccaggtaatttctaatgcaaagaacacagtccaaggatttaaaagattccatggccgagcattctctgatccatttgtggaggcagaaaaatctaaccttgcatatgatattgtgcagttgcctacaggattaacaggtataaaggtgacatatatggaggaagagcgaaattttaccactgagcaagtgactgccatgcttttgtccaaactgaaggagacagccgaaagtgttcttaagaagcctgtagttgactgtgttgtttcggttccttgtttctatactgatgcagaaagacgatcagtgatggatgcaacacagattgctggtcttaattgcttgcgattaatgaatgaaaccactgcagttgctcttgcatatggaatctataagcaggatcttcctgccttagaagagaaaccaagaaatgtagtttttgtagacatgggccactctgcttatcaagtttctgtatgtgcatttaatagaggaaaactgaaagttctggccactgcatttgacacgacattgggaggtagaaaatttgatgaagtgttagtaaatcacttctgtgaagaatttgggaagaaatacaagctagacattaagtccaaaatccgtgcattattacgactctctcaggagtgtgagaaactcaagaaattgatgagtgcaaatgcttcagatctccctttgagcattgaatgttttatgaatgatgttgatgtatctggaactatgaatagaggcaaatttctggagatgtgcaatgatctcttagctagagtggagccaccacttcgtagtgttttggaacaaaccaagttaaagaaagaagatatttatgcagtggagatagttggtggtgctacacgaatccctgcggtaaaagagaagatcagcaaatttttcggtaaagaacttagtacaacattaaatgctgatgaagctgtcactcgaggctgtgcattgcagtgtgccatcttatcgcctgctttcaaagtcagagaattttctatcactgatgtagtaccatatccaatatctctgagatggaattctccagctgaagaagggtcaagtgactgtgaagtcttttccaaaaatcatgctgctcctttctctaaagttcttacattttatagaaaggaacctttcactcttgaggcctactacagctctcctcaggatttgccctatccagatcctgctatagctcagttttcagttcagaaagtcactcctcagtctgatggctccagttcaaaagtgaaagtcaaagttcgagtaaatgtccatggcattttcagtgtgtccagtgcatctttagtggaggttcacaagtctgaggaaaatgaggagccaatggaaacagatcagaatgcaaaggaggaagagaagatgcaagtggaccaggaggaaccacatgttgaagagcaacagcagcagacaccagcagaaaataaggcagagtctgaagaaatggagacctctcaagctggatccaaggataaaaagatggaccaaccaccccaagccaagaaggcaaaagtgaagaccagtactgtggacctgccaatcgagaatcagctattatggcagatagacagagagatgctcaacttgtacattgaaaatgagggtaagatgatcatgcaggataaactggagaaggagcggaatgatgctaagaacgcagtgagggaatatgtgtatgaaatgagagacaagcttagtggtgaatatgagaagtttgtgagtgaagatggtcgtaacagttttactttgaaactggaagatactgaaaattggttgtatgaggatggagaagaccagccaaagcaagtttatgttgataagttggctgaattaaaaaatctaggtcaacctattaagatacgtttccaggaatctgaagaacgaccaaaattatttgaagaactagggaaacagatccaacagtatatgaaaataatcagctctttcaaaaacaaggaggaccagtatgatcatttggatgctgctgacatgacaaaggtagaaaaaagcacaaatgaagcaatggagtggatgaataacaagctaaatctgcagaacaagcagagtttgaccatggatccagttgtcaagtcaaaagagattgaagctaaaattaaggagctgacaagtacttgtagccctataatttcaaagcccaaacccaaagtggaacctccaaaagaggaacaaaaaaatgcagagcagaatggaccagtggatggacaaggagacaacccaggcccccaggctgctgagcagggtacagacacagctgtgccttcggattcagacaagaagcttcctgaaatggacattgattgattccaacacttgtttctattaaaacagactattataaa

SEQ ID NO: 1102 - protein, 840 aa, Homo sapiens
MSVVGIDLGFQSCYVAVARAGGIETIANEYSDRCTPACISFGPKNRSIGAAAKSQVISNAKNTVQGFKRFHGRAFSDPFVEAEKSNLAYDIVQLPTGLTGIKVTYMEEERNFTTEQVTAMLLSKLKETAESVLKKPVVDCVVSVPCFYTDAERRSVMDATQIAGLNCLRLMNETTAVALAYGIYKQDLPALEEKPRNVVFVDMGHSAYQVSVCAFNRGKLKVLATAFDTTLGGRKFDEVLVNHFCEEFGKKYKLDIKSKIRALLRLSQECEKLKKLMSANASDLPLSIECFMNDVDVSGTMNRGKFLEMCNDLLARVEPPLRSVLEQTKLKKEDIYAVEIVGGATRIPAVKEKISKFFGKELSTTLNADEAVTRGCALQCAILSPAFKVREFSITDVVPYPISLRWNSPAEEGSSDCEVFSKNHAAPFSKVLTFYRKEPFTLEAYYSSPQDLPYPDPAIAQFSVQKVTPQSDGSSSKVKVKVRVNVHGIFSVSSASLVEVHKSEENEEPMETDQNAKEEEKMQVDQEEPHVEEQQQQTPAENKAESEEMETSQAGSKDKKMDQPPQAKKAKVKTSTVDLPIENQLLWQIDREMLNLYIENEGKMIMQDKLEKERNDAKNAVREYVYEMRDKLSGEYEKFVSEDGRNSFTLKLEDTENWLYEDGEDQPKQVYVDKLAELKNLGQPIKIRFQESEERPKLFEELGKQIQQYMKIISSFKNKEDQYDHLDAADMTKVEKSTNEAMEWMNNKLNLQNKQSLTMDPVVKSKEIEAKIKELTSTCSPIISKPKPKVEPPKEEQKNAEQNGPVDGQGDNPGPQAAEQGTDTAVPSDSDKKLPEMDID

SEQ ID NO: 1103 - DNA, 2326 bp, Homo sapiens
ccatcctaatacgactcactatagggctcgagcggccgcccgggcaggtacgccctatacaacttggcttcacatacttttacactaactttatatgatttttaaaaactggtctgatcggacttctcgtcctgggacactgtttactggagtctggccggctctccgtgctcctcttggtacctcattttggggagaaccttaaacccactcgagcagataatctccgccttgaccggtgccaccaaagaagccttggaaccatgtggacttttctgggcattgccactttcacctatttttataagaagttcggggacttcatcactttggccaacagggaggtcctgttgtgcgtgctggtgttcctctcgctgggcctggtgctctcctaccgctgtcgccaccgaaacgggggtctcctcgggcgccagcagagcggctcccagttcgccctcttctcggatattctctcaggcctgcctttcattggcttcttctgggccaaatccccccctgaatcagaaaataaggagcagctcgaggccaggaggcgcagaaaaggaaccaatatttcagaaacaagcttaataggaacagctgcctgtacatcaacatcttctcagaatgacccagaagttatcatcgtgggagctggcgtgcttggctctgctttggcagctgtgctttccagagatggaagaaaggtgacagtcattgagagagacttaaaagagcctgacagaatagttggagaattcctgcagccgggtggttatcatgttctcaaagaccttggtcttggagatacagtggaaggtcttgatgcccaggttgtaaatggttacatgattcatgatcaggaaagcaaatcagaggttcagattccttaccctctgtcagaaaacaatcaagtgcagagtggaagagctttccatcacggaagattcatcatgagtctccggaaagcagctatggcagagcccaatgcaaagtttattgaaggtgttgtgttacagttattagaagaagatgatgttgtgatgggagttcagtacaaggataaagagactggagatatcaaggaactccatgctccactgactgttgttgcagatgggcttttctccaagttcaggaaaagcctggtctccaataaagtttctgtatcatctcattttgttggctttcttatgaagaatgcaccacagtttaaagcaaatcatgctgaacttattttagctaacccgagtccagttctcatctaccagatttcatccagtgaaactcgagtacttgttgacattagaggagaaatgccaaggaatttaagagaatacatggttgaaaaaatttacccacaaatacctgatcacctgaaagaaccattcttagaagccactgacaattctcatctgaggttcatgccagcaagcttccttcctccttcatcagtgaagaaacgaggtgttcttcttttgggagacgcatataatatgaggcatccacttactggtggaggaatgactgttgcttttaaagatataaaactatggagaaaactgctaaagggtatccctgacctttatgatgatgcagctattttcgaggccaaaaaatcattttactgggcaagaaaaacatctcattcctttgtcgtgaatatccttgctcaggctctttatgaattattttctgccacagatgattccctgcatcaactaagaaaagcctgttttctttatttcaaacttggtggcgaatgtgttgcgggtcctgttgggctgctttctgtattgtctcctaaccctctagttttaattggacacttctttgctgttgcaatctatgccgtgtatttttgctttaagtcagaaccttggattacaaaacctcgagcccttctcagtagtggtgctgtattgtacaaagcgtgttctgtaatatttcctctaatttactcagaaatgaagtatatggttcattaagcttaaaggggaaccatttgtgaatgaatatttggaacttaccaagtcctaagagacttttggaagaggatatatatagcatagtaccataccacttataaagtggaaactcttggaccaagatttggattaatttgtttttgaagttttttgtatataaatatgtaaatacatgctttaatttgcaatttaaaatgaaggggttaaataagttagacatttaaaagaaatgattgttaccataaattagtgctaatgctgaggagaactacagtttttcttttgaatttagtatttgagatgagttgttgggacatgcaaataaaatgaagaatgaa

SEQ ID NO: 1104 - DNA, 1484 bp, Homo sapiens
tggaagcgcgtgcttttgtttgtgtccctggccatggcgctgcagctctcccgggagcagggaatcaccctgcgcgggagcgccgaaatcgtggccgagttcttctcattcggcatcaacagcattttatatcagcgtggcatatatccatctgaaacctttactcgagtgcagaaatacggactcaccttgcttgtaactactgatcttgagctcataaaatacctaaataatgtggtggaacaactgaaagattggttatacaagtgttcagttcagaaactggttgtagttatctcaaatattgaaagtggtgaggtcctggaaagatggcagtttgatattgagtgtgacaagactgcaaaagatgacagtgcacccagagaaaagtctcagaaagctatccaggatgaaatccgttcagtgatcagacagatcacagctacggtgacatttctgccactgttggaagtttcttgttcatttgatctgctgatttatacagacaaagatttggttgtacctgaaaaatgggaagagtcgggaccacagtttattaccaattctgaggaagtgcgccttcgttcatttactactacaatccacaaagtaaatagcatggtggcctacaaaattcctgtcaatgactgaggatgacatgaggaaaataatgtaattgtaattttgaaatgtggttttcctgaaatcaggtcatctatagttgatatgttttatttcattggttaatttttacatggagaaaaccaaaatgatacttactgaactgtgtgtaattgttccttttatttttttggtacctatttgacttaccatggagttaacatcatgaatttattgcacattgttcaaaaggaaccaggaggtttttttgtcaacattgtgatgtatattcctttgaagatagtaactgtagatggaaaaacttgtgctataaagctagatgctttcctaaatcagatgttttggtcaagtagtttgactcagtataggtagggagatatttaagtataaaatacaacaaaggaagtctaaatattcagaatctttgttaaggtcctgaaagtaactcataatctataaacaatgaaatattgctgtatagctccttttgaccttcatttcatgtatagttttccctattgaatcagtttccaattatttgactttaatttatgtaacttgaacctatgaagcaatggatatttgtactgtttaatgttctgtgatacagaacagattaatactccctttttatcattacagttagctaaaaaattgccaggcagtccacaaaacagaatttgctttaagaccaacccacagagtcagctggagactaacggcgctggggcctgctgggccgggatatagtcgtgtttagctaagtgtcgagagcattaagaagaaagtcctggttggaggcgcaaggcctgcagcaccagctgtggaatccccaataatgt

SEQ ID NO: 1105 - DNA, 1917 bp, Homo sapiens
atttagagccgggtaggggagcgcagcggccagatacctcagcgctacctggcggaactggatttctctcccgcctgccggcctgcctgccacagccggactccgccactccggtagcctcatggctgcaacctgtgagattagcaacatttttagcaactacttcagtgcgatgtacagctcggaggactccaccctggcctctgttccccctgctgccacctttggggccgatgacttggtactgaccctgagcaacccccagatgtcattggagggtacagagaaggccagctggttgggggaacagccccagttctggtcgaagacgcaggttctggactggatcagctaccaagtggagaagaacaagtacgacgcaagcgccattgacttctcacgatgtgacatggatggcgccaccctctgcaattgtgcccttgaggagctgcgtctggtctttgggcctctgggggaccaactccatgcccagctgcgagacctcacttccagctcttctgatgagctcagttggatcattgagctgctggagaaggatggcatggccttccaggaggccctagacccagggccctttgaccagggcagcccctttgcccaggagctgctggacgacggtcagcaagccagcccctaccaccccggcagctgtggcgcaggagccccctcccctggcagctctgacgtctccaccgcagggactggtgcttctcggagctcccactcctcagactccggtggaagtgacgtggacctggatcccactgatggcaagctcttccccagcgatggttttcgtgactgcaagaagggggatcccaagcacgggaagcggaaacgaggccggccccgaaagctgagcaaagagtactgggactgtctcgagggcaagaagagcaagcacgcgcccagaggcacccacctgtgggagttcatccgggacatcctcatccacccggagctcaacgagggcctcatgaagtgggagaatcggcatgaaggcgtcttcaagttcctgcgctccgaggctgtggcccaactatggggccaaaagaaaaagaacagcaacatgacctacgagaagctgagccgggccatgaggtactactacaaacgggagatcctggaacgggtggatggccggcgactcgtctacaagtttggcaaaaactcaagcggctggaaggaggaagaggttctccagagtcggaactgagggttggaactatacccgggaccaaactcacggaccactcgaggcctgcaaaccttcctgggaggacaggcaggccagatggcccctccactggggaatgctcccagctgtgctgtggagagaagctgatgttttggtgtattgtcagccatcgtcctgggactcggagactatggcctcgcctccccaccctcctcttggaattacaagccctggggtttgaagctgactttatagctgcaagtgtatctccttttatctggtgcctcctcaaacccagtctcagacactaaatgcagacaacaccttcctcctgcagacacctggactgagccaaggaggcctggggaggccctaggggagcaccgtgatggagaggacagagcaggggctccagcaccttctttctggactggcgttcacctccctgctcagtgcttgggctccacgggcaggggtcagagcactccctaatttatgtgctatataaatatgtcagatgtacatagagatctattttttctaaaacattcccctccccactcctctcccacagagtgctggactgttccaggccctccagtgggctgatgctgggacccttaggatggggctcccagctcctttctcctgtgaatggaggcagagacctccaataaagtgccttctgggctttttct

SEQ ID NO: 1106 - DNA, 1528 bp, Homo sapiens
cggcgagcgagcaccttcgacgcggtccggggaccccctcgtcgctgtcctcccgacgcggacccgcgtgccccaggcctcgcgctgcccggccggctcctcgtgtcccactcccggcgcacgccctcccgcgagtcccgggcccctcccgcgcccctcttctcggcgcgcgcgcagcatggcgcccccgcaggtcctcgcgttcgggcttctgcttgccgcggcgacggcgacttttgccgcagctcaggaagaatgtgtctgtgaaaactacaagctggccgtaaactgctttgtgaataataatcgtcaatgccagtgtacttcagttggtgcacaaaatactgtcatttgctcaaagctggctgccaaatgtttggtgatgaaggcagaaatgaatggctcaaaacttgggagaagagcaaaacctgaaggggccctccagaacaatgatgggctttatgatcctgactgcgatgagagcgggctctttaaggccaagcagtgcaacggcacctccacgtgctggtgtgtgaacactgctggggtcagaagaacagacaaggacactgaaataacctgctctgagcgagtgagaacctactggatcatcattgaactaaaacacaaagcaagagaaaaaccttatgatagtaaaagtttgcggactgcacttcagaaggagatcacaacgcgttatcaactggatccaaaatttatcacgagtattttgtatgagaataatgttatcactattgatctggttcaaaattcttctcaaaaaactcagaatgatgtggacatagctgatgtggcttattattttgaaaaagatgttaaaggtgaatccttgtttcattctaagaaaatggacctgacagtaaatggggaacaactggatctggatcctggtcaaactttaatttattatgttgatgaaaaagcacctgaattctcaatgcagggtctaaaagctggtgttattgctgttattgtggttgtggtgatagcagttgttgctggaattgttgtgctggttatttccagaaagaagagaatggcaaagtatgagaaggctgagataaaggagatgggtgagatgcatagggaactcaatgcataactatataatttgaagattatagaagaagggaaatagcaaatggacacaaattacaaatgtgtgtgcgtgggacgaagacatctttgaaggtcatgagtttgttagtttaacatcatatatttgtaatagtgaaacctgtactcaaaatataagcagcttgaaactggctttaccaatcttgaaatttgaccacaagtgtcttatatatgcagatctaatgtaaaatccagaacttggactccatcgttaaaattatttatgtgtaacattcaaatgtgtgcattaaatatgcttccacagtaaaatctgaaaaactgatttgtgattgaaagctgcctttctatttacttgagtcttgtacatacatacttttttatgagctatgaaataaaacattttaaactg

SEQ ID NO: 1107 - protein, 574 aa, Homo sapiens
MWTFLGIATFTYFYKKFGDFITLANREVLLCVLVFLSLGLVLSYRCRHRNGGLLGRQQSGSQFALFSDILSGLPFIGFFWAKSPPESENKEQLEARRRRKGTNISETSLIGTAACTSTSSQNDPEVIIVGAGVLGSALAAVLSRDGRKVTVIERDLKEPDRIVGEFLQPGGYHVLKDLGLGDTVEGLDAQVVNGYMIHDQESKSEVQIPYPLSENNQVQSGRAFHHGRFIMSLRKAAMAEPNAKFIEGVVLQLLEEDDVVMGVQYKDKETGDIKELHAPLTVVADGLFSKFRKSLVSNKVSVSSHFVGFLMKNAPQFKANHAELILANPSPVLIYQISSSETRVLVDIRGEMPRNLREYMVEKIYPQIPDHLKEPFLEATDNSHLRFMPASFLPPSSVKKRGVLLLGDAYNMRHPLTGGGMTVAFKDIKLWRKLLKGIPDLYDDAAIFEAKKSFYWARKTSHSFVVNILAQALYELFSATDDSLHQLRKACFLYFKLGGECVAGPVGLLSVLSPNPLVLIGHFFAVAIYAVYFCFKSEPWITKPRALLSSGAVLYKACSVIFPLIYSEMKYMVH

SEQ ID NO: 1108 - protein, 205 aa, Homo sapiens
MALQLSREQGITLRGSAEIVAEFFSFGINSILYQRGIYPSETFTRVQKYGLTLLVTTDLELIKYLNNVVEQLKDWLYKCSVQKLVVVISNIESGEVLERWQFDIECDKTAKDDSAPREKSQKAIQDEIRSVIRQITATVTFLPLLEVSCSFDLLIYTDKDLVVPEKWEESGPQFITNSEEVRLRSFTTTIHKVNSMVAYKIPVND

SEQ ID NO: 1109 - protein, 371 aa, Homo sapiens
MAATCEISNIFSNYFSAMYSSEDSTLASVPPAATFGADDLVLTLSNPQMSLEGTEKASWLGEQPQFWSKTQVLDWISYQVEKNKYDASAIDFSRCDMDGATLCNCALEELRLVFGPLGDQLHAQLRDLTSSSSDELSWIIELLEKDGMAFQEALDPGPFDQGSPFAQELLDDGQQASPYHPGSCGAGAPSPGSSDVSTAGTGASRSSHSSDSGGSDVDLDPTDGKLFPSDGFRDCKKGDPKHGKRKRGRPRKLSKEYWDCLEGKKSKHAPRGTHLWEFIRDILIHPELNEGLMKWENRHEGVFKFLRSEAVAQLWGQKKKNSNMTYEKLSRAMRYYYKREILERVDGRRLVYKFGKNSSGWKEEEVLQSRN

SEQ ID NO: 1110 - protein, 314 aa, Homo sapiens
MAPPQVLAFGLLLAAATATFAAAQEECVCENYKLAVNCFVNNNRQCQCTSVGAQNTVICSKLAAKCLVMKAEMNGSKLGRRAKPEGALQNNDGLYDPDCDESGLFKAKQCNGTSTCWCVNTAGVRRTDKDTEITCSERVRTYWIIIELKHKAREKPYDSKSLRTALQKEITTRYQLDPKFITSILYENNVITIDLVQNSSQKTQNDVDIADVAYYFEKDVKGESLFHSKKMDLTVNGEQLDLDPGQTLIYYVDEKAPEFSMQGLKAGVIAVIVVVVIAVVAGIVVLVISRKKRMAKYEKAEIKEMGEMHRELNA

SEQ ID NO: 1111 - DNA, 1360 bp, Homo sapiens
cgggggttgctccgtccgtgctccgcctcgccatgacttcctacagctatcgccagtcgtcggccacgtcgtccttcggaggcctgggcggcggctccgtgcgttttgggccgggggtcgcttttcgcgcgcccagcattcacgggggctccggcggccgcggcgtatccgtgtcctccgcccgctttgtgtcctcgtcctcctcggggggctacggcggcggctacggcggcgtcctgaccgcgtccgacgggctgctggcgggcaacgagaagctaaccatgcagaacctcaacgaccgcctggcctcctacctggacaaggtgcgcgccctggaggcggccaacggcgagctagaggtgaagatccgcgactggtaccagaagcaggggcctgggccctcccgcgactacagccactactacacgaccatccaggacctgcgggacaagattcttggtgccaccattgagaactccaggattgtcctgcagatcgacaacgcccgtctggctgcagatgacttccgaaccaagtttgagacggaacaggctctgcgcatgagcgtggaggccgacatcaacggcctgcgcagggtgctggatgagctgaccctggccaggaccgacctggagatgcagatcgaaggcctgaaggaagagctggcctacctgaagaagaaccatgaggaggaaatcagtacgctgaggggccaagtgggaggccaggtcagtgtggaggtggattccgctccgggcaccgatctcgccaagatcctgagtgacatgcgaagccaatatgaggtcatggccgagcagaaccggaaggatgctgaagcctggttcaccagccggactgaagaattgaaccgggaggtcgctggccacacggagcagctccagatgagcaggtccgaggttactgacctgcggcgcacccttcagggtcttgagattgagctgcagtcacagctgagcatgaaagctgccttggaagacacactggcagaaacggaggcgcgctttggagcccagctggcgcatatccaggcgctgatcagcggtattgaagcccagctggcggatgtgcgagctgatagtgagcggcagaatcaggagtaccagcggctcatggacatcaagtcgcggctggagcaggagattgccacctaccgcagcctgctcgagggacaggaagatcactacaacaatttgtctgcctccaaggtcctctgaggcagcaggctctggggcttctgctgtcctttggagggtgtcttctgggtagagggatgggaaggaagggacccttacccccggctcttctcctgacctgccaataaaaatttatggtccaaggg

SEQ ID NO: 1112 - DNA, 16382 bp, Homo sapiens
ctgcagccatgggtgccctatggagctggtggatactctgggctggagcaaccctcctgtggggattgacccaggaggcttcagtggacctcaagaacactggcagagaggaattcctcacagccttcctgcagaactatcagctggcctacagcaaggcctacccccgcctccttatctccagtctgtcagagagccccgcttcagtctccatcctcagccaggcagacaacacctcaaagaaggtcacagtgaggcccggggagtcggtcatggtcaacatcagtgccaaggctgagatgataggcagcaagatcttccagcatgcggtggtgatccattctgactatgccatctctgtgcaggcactaaatgccaagcctgacacagcggagctgacactgctgcggcccatccaggccctaggcaccgagtattttgtgctcacaccccccggcacctcagccaggaatgtcaaggagtttgccgtggtggccggtgccgcaggtgcctcggtcagtgtcacgctgaaggggtcagtgacattcaatggcaagttctatccagcaggcgatgtcctaagagtgactctacagccctacaatgtggcccagctacagagctcagtggatctctcggggtcaaaggtcacagctagtagccccgtggctgtcctctctggccacagctgtgcgcagaaacatacgacctgcaaccatgtggttgagcagctgctacccacgtctgcctggggcacccactatgtagtacccacgctggcctcccaatctcgctatgatttggccttcgttgtggccagccaggccacaaagctgacctacaaccatgggggtatcactggctcccgtgggctccaggcaggtgatgtggtagagtttgaggtccggccatcctggccactctacctgtctgcaaatgtgggcatccaggtcctgttgtttggcacaggtgccataaggaatgaagtgacttatgacccctacctggtcctgatcccagatgtggcggcctactgcccagcctatgtggtcaagagtgtaccaggctgtgagggcgtggccctggtagtggcacagacgaaggctatcagcgggctgaccatagatgggcatgcagtgggggccaagctcacctgggaggctgtgccaggcagtgagttctcgtatgctgaagtggagctcggcacagctgacatgatccacacggccgaggccaccaccaacttgggactgctcaccttcgggctggccaaggctataggctacgcaacagctgctgattgcggccggactgtactgtccccagtggagccctcctgcgaaggcatgcagtgcgcagccgggcagcgctgccaggtggtaggcgggaaggccgggtgtgtggcggagtccaccgctgtctgccgcgcccagggcgacccccattacaccaccttcgacggccgtcgctacgacatgatgggcacctgttcgtacacgatggtggagctgtgcagcgaggacgacaccctgcccgccttcagcgtggaggccaagaacgagcaccggggcagccgccgcgtctcctacgtgggcctcgtcactgtgcgcgcctacagccactctgtgtcgctgacccgcggtgaagttggcttcgtcctggttgacaaccagcgctcgcgcctgccagtctccctgagtgagggtcgcctgcgtgtgtaccagagcggaccacgggccgtggtggagctggtctttgggctggtggtcacttatgactgggactgccagctggcactcagcctgcctgcacgcttccaagaccaggtgtgcgggctgtgtggcaactataatggtgacccagcagacgacttcctcacgcctgacggggctctggctcctgacgctgtggagttcgcaagtagctggaagctggatgatggggactacctgtgtgaggatggctgccagaacaactgtcccgcctgcaccccaggccaggcccaacactatgagggcgaccgactctgtggcatgctgaccaagctcgatggccccttcgctgtctgccatgacaccctggaccccaggcccttcctggagcagtgtgtatatgacctgtgtgtggtcggtggggagcggctcagcctgtgccgtggcctcagcgcctatgcccaggcctgtctggagcttggcatctcggttggggactggagatcaccagccaactgccccctgtcctgccctgccaacagccgctatgagctctgcggccctgcttgcccgacctcctgcaacggggctgcggcgccgtccaactgctccgggcgcccctgcgtggagggctgcgtgtgcctcccaggcttcgtggccagcggcggcgcctgcgtgccggcctcgtcgtgtggctgcaccttccagggtctccagctcgctccgggccaggaagtgtgggcggacgagttgtgccaaaggcgctgcacctgcaacggcgccacccatcaggtcacctgccgcgacaagcagagctgcccggcgggtgagcgctgcagcgtccagaacggcctcctgggctgctaccccgatcgcttcgggacctgccaggggtccggggacccacactatgtgagcttcgacggccggcgcttcgacttcatgggcacctgcacgtacctgctggtcggctcatgcggccagaacgcagcgctgcctgccttccgggtgctggtggaaaacgagcatcggggcagccagactgtgagctacacgcgcgccgtgcgggtggaggcccgcggggtgaaggtggccgtgcgccgggagtaccccgggcaagtgctggtggatgacgtccttcagtatctgcccttccaagcagcagatgggcaggtgcaggtgttccgacagggcagggatgccgtcgtgcgcacggactttggcctgactgtcacttatgactggaatgcacgagtgactgccaaggtgcccagcagctatgctgaggccctgtgtggactctgtgggaacttcaacggggacccagctgatgacctggctctgcggggtgggggtcaagctgccaatgcactggcctttgggaacagctggcaagaagagacgaggcccggctgtggagcaactgaaccgggtgactgtcccaagctggactccctggtggcccagcagctgcagagcaagaatgagtgtggaatccttgccgaccccaaggggcccttccgggagtgccatagcaagctggacccccagggtgccgtgcgcgactgtgtctatgaccgctgcctgctgccaggccagtctgggccactgtgtgacgcactggccacctatgctgctgcatgccaggctgctggagccacagtgcacccctggaggagtgaagaactttgcccactgagctgcccaccccacagccactatgaggcgtgttcctacggctgcccgctgtcctgtggagacctcccagtgcccgggggctgtggctcagaatgccatgagggctgcgtgtgcgatgagggctttgcgctcagtggtgagtcctgcctgcccctggcctcctgtggctgcgtacaccagggcacctaccacccaccaggccagaccttctaccctggccccggatgtgattccctttgccactgccaggagggcggcctggtgtcctgtgagtcctccagctgcggaccgcacgaggcctgccagccatccggtggcagcttgggctgtgtggccgtgggctctagcacctgccaggcgtcaggagacccccactacaccaccttcgatggccgccgcttcgacttcatgggcacctgcgtgtatgtgctggctcagacctgcggcacccggcctggcctgcatcggtttgccgtcctgcaggagaacgtggcctggggtaatgggcgagtcagtgtgaccagggtgatcacggtccaggtggcaaacttcaccctgcggctggagcagagacagtggaaggtcacggtgaacggtgtggacatgaagctgcccgtggtgctggccaacggccagatccgtgcctcccagcatggttcagatgttgtgattgagaccgacttcggcctgcgtgtggcctacgaccttgtgtactatgtgcgggtcaccgtccccggaaactactaccagcagatgtgtggcctgtgtgggaactacaacggcgaccccaaggatgacttccagaagcccaatggctcacaggcaggcaacgccaatgagttcggcaactcctgggaggaggtggtgcccgactctccctgcctgccgcccaccccttgcccgccggggagcgaggactgtatccccagccacaagtgtcctcccgagctggagaagaagtatcagaaggaggagttctgtgggctcctctccagccccacagggccactgtcctcctgccacaagctggtggatccccagggtcccttgaaagattgcatctttgatctctgcctgggtggtgggaacctgagcattctctgcagcaacatccatgcctacgtgagtgcttgccaggcggctggaggccacgtggagccctggaggactgaaactttctgtcccatggagtgccctccgaacagtcactacgagctctgtgcggacacctgctccctgggctgctcagctctcagtgcccctccacagtgccaggatgggtgtgctgagggctgccagtgtgactccggcttcctctacaatggccaagcctgcgtgcccatccagcaatgcggctgctaccacaatggtgtctactatgagccggagcagacagtcctcattgacaactgtcggcagcagtgcacgtgccatgcgggtaaaggcatggtgtgccaggaacacagctgcaagccggggcaggtgtgccagccctccggaggcatcctgagctgcgtcaccaaagacccgtgccacggcgtgacatgccggccacaggagacatgcaaggagcagggtggccagggcgtgtgcctgcccaactatgaggccacgtgctggctgtggggcgacccacactaccactccttcgatggccggaagtttgacttccagggcacctgtaactatgtgctggcaacaactggctgcccgggggtcagcacccagggcctgacacccttcaccgtcaccaccaagaaccagaaccggggcaaccctgctgtgtcctacgtgagagtcgtcaccgtggctgccctcggcaccaacatctccatccacaaggacgagatcggcaaagtccgggtgaacggtgtgctcacagccttgcctgtctctgtggccgacgggcggatttcagtgacccagggtgcatcgaaggcactgctggtggctgactttggactgcaagtcagctatgactggaactggcgggtagacgtgacgctgcccagcagctatcatggcgcagtgtgcgggctctgcggtaacatggaccgcaaccccaacaatgaccaggtcttccctaatggcacactggctccctccatacccatctggggcggcagctggcgagccccaggctgggacccactgtgttgggacgaatgtcgggggtcctgcccaacgtgccctgaggaccggttggagcagtacgagggccctggcttctgcggacccctggcccccggcacagggggccctttcaccacctgccatgctcatgtgccacctgagagcttcttcaagggctgtgttctggacgtctgcatgggtggtggggaccgtgacattctttgcaaggctctggcttcctatgtggccgcctgccaggctgctggggttgtcatcgaagactggcgggcacaggttggctgtgagatcacctgcccagaaaacagccactatgaggtctgtggcccaccctgcccggccagctgtccgtcccctgcaccccttacgacgccagccgtatgtgagggcccctgtgtggagggctgccagtgcgacgcgggtttcgtgttaagtgctgaccgctgtgttcccctcaacaacggctgcggctgctgggccaatggcacctaccacgaggcgggcagtgagttttgggctgatggcacctgctcccagtggtgtcgctgcgggcctgggggtggctcgctggtctgcacacctgccagctgtgggctgggtgaagtgtgtggcctcctgccatccggccagcacggctgccagcccgtcagcacagctgagtgccaggcgtggggtgacccccattacgtcactctggatgggcaccgattcaatttccaaggcacctgcgagtacctgctgagtgcaccctgccacggaccacccttgggggctgagaacttcactgtcactgtagccaatgagcaccggggcagccaggctgtcagctacacccgcagtgtcaccctgcaaatctacaaccacagcctgacactgagtgcccgctggccccggaagctacaggtggacggcgtgttcgtcactctgcccttccagctggactcgctcctgcacgcacacctgagcggcgccgacgtggtggtgaccacaacctcagggctctcgctggctttcgacggggacagcttcgtgcgcctgcgcgtgccggcggcgtacgcgggctctctctgtggcttatgcgggaactacaaccaggaccccgcagacgacctgaaggcggtgggcgggaagcccgccggatggcaggtgggcggcgcccagggctgcggggaatgtgtgtccaagccatgcccgtcgccgtgcaccccagagcagcaagagtccttcggcggcccggacgcctgcggcgtgatctccgccaccgacggcccgctggcgccctgccacggccttgtgccgcccgcgcagtacttccagggctgcttgctggacgcctgccaagttcagggccatcctggaggcctctgtcctgcagtggccacctacgtggcagcctgtcaggccgctggggcccagctccgcgagtggaggcggccggacttctgtcccttccagtgccctgcccacagccactacgagctctgcggtgactcctgtcctgggagctgcccgagcctgtcggcacccgagggctgtgagtcggcctgccgtgaaggctgtgtctgcgatgctggcttcgtgctcagtggtgacacgtgtgtacctgtgggccagtgtggctgcctccacgatgaccgctactacccactgggccagaccttctaccctggccctgggtgtgattccctttgccgctgccgggagggcggtgaggtgtcctgtgagccctccagctgcggcccgcatgagacctgccggccatccggtggcagcttgggctgcgtggccgtgggctctaccacctgccaggcgtcgggagatccccactacaccaccttcgatggccgccgcttcgacttcatgggcacctgcgtgtatgtgctggctcagacctgcggcacccggcctggcctacatcggtttgccgtcctgcaggagaacgtggcctggggtaatgggcgagtcagtgtgaccagggtgatcacggtccaggtggcaaacttcaccctgcggctggagcagagacagtggaaggtcacggtgaacggtgtggacatgaagctgcccgtggtgctggccaacggccagatccgtgcctcccagcatggttcagatgttgtgattgagaccgacttcggcctgcgtgtggcctacgaccttgtgtactatgtgcgggtcaccgtccctggaaactactaccagctgatgtgtggcctgtgtgggaactacaacggcgaccccaaggatgacttccagaagcccaatggctcgcaggcaggcaacgccaatgagttcggcaactcctgggaggaggtggtgcccgactctccctgcctgccgccgcccacctgcccgccggggagcgagggctgtatccccagcgaggagtgtcctcccgagctggagaagaagtatcagaaggaggagttctgtgggctcctctccagccccacagggccactgtcctcctgccacaagctggtggatccccagggtcccttgaaagattgcatctttgatctctgcctgggtggtgggaacctgagcattctctgcagcaacatccatgcctacgtgagtgcttgccaggcggctggaggccacgtggagccctggaggaatgaaactttctgtcccatggaatgccctcagaacagtcactacgagctctgtgcggacacctgctccctgggctgctcggctctcagtgcccctctgcagtgcccagatgggtgtgctgagggctgccagtgtgactccggcttcctctacaacggccaagcctgcgtgcccatccagcaatgtggctgctaccacaatggtgcctactatgagccggagcagacagtcctcattgacaactgtcggcagcagtgcacgtgccatgcgggtaaagtcgtggtgtgccaggaacacagctgcaagccggggcaggtgtgccagccctccggaggcatcctgagctgcgtcaccaaagacccgtgccacggcgtgacatgccggccacaggagacatgcaaggagcagggtggccagggtgtgtgcctgcccaactatgaggccacgtgctggctgtggggcgacccacactaccactccttcgatggccggaagtttgacttccagggcacctgtaactatgtgctggcaacaactggctgcccgggggtcagcacccagggcctgacacccttcaccgtcaccaccaagaaccagaaccggggcaaccctgctgtatcctacgtgagagtcgtcaccgtggctgccctcggcaccaacatctccatccacaaggacgagatcggcaaagtccgggtgaacggtgtgctcacagccttgcctgtctccgtggccgacgggcggatttcagtggcccagggtgcatcgaaggcactgctggtggctgactttggactgcaagtcagctatgactggaactggcgggtagacgtgacgctccccagcagctatcatggcgcagtgtgcgggctctgcggtaacatggaccgcaaccccaacaatgaccaggtcttccctaatggcacactggctccctccatacccatctggggcggcagctggcgagccccaggctgggacccactgtgttgggacgaatgtcgggggtcctgcccaacgtgccctgaggaccggttggagcagtacgagggccctggcttctgcggacccctggcccccggcacagggggccctttcaccacctgccatgctcatgtgccacctgagagcttcttcaagggctgtgttctggacgtctgcatgggtggtggggaccatgacattctttgcaaggctctggcttcctacgtggccgcctgccaggccgctggggttgtcatcgaagactggcgggcacaggttggctgtgagatcacctgcccagaaaacagccactatgaggtctgtggcccaccctgcccggccagctgtccgtcccctgcaccccttacgacgccagccgtatgtgagggcccctgtgtggagggctgccagtgcgacgcgggtttcgtgttaagtgctgaccgctgtgttcccctcaacaacggctgcggctgctgggccaatggcacctaccacgaggcgggcagtgagttttgggctgatggcacctgctcccagtggtgtcgctgcgggcctgggggtggctcgctggtctgcacacctgccagctgtgggctgggtgaagtgtgtggcctcctgccatccggccagcacggctgccagcccgtcagcacagctgagtgccaggcgtggggtgacccccattacgtcactctggatgggcaccgattcgatttccaaggcacctgcgagtacctgctgagtgcaccctgccacggaccacccttgggggctgagaacttcactgtcactgtagccaatgagcaccggggcagccaggctgtcagctacacccgcagtgtcaccctgcaaatctacaaccacagcctgacactgagtgcccgctggccccggaagctacaggtggacggcgtgttcgtcactctgcccttccagctggactcgctcctgcacgcacacctgagcggcgccgacgtggtggtgaccacaacctcagggctctcgctggctttcgacggggacagcttcgtgcgcctgcgcgtgccggcggcgtacgcgggctctctctgtggcttatgcgggaactacaaccaggaccccgcagacgacctgaaggcggtgggcgggaagcccgccggatggcaggtgggcggcgcccagggctgcggggaatgtgtgtccaagccatgcccgtcgccgtgcaccccagagcagcaagagtccttcggcggcccggacgcctgcggcgtgatctccgccaccgacggcccgctggcgccctgccacggccttgtgccgcccgcgcagtacttccagggctgcttgctggacgcctgccaagttcagggccatcctggaggcctctgtcctgcagtggccacctacgtggcagcctgtcaggccgctggggcccagctccgcgagtggaggcggccggacttctgtcccttccagtgccctgcccacagccactacgagctctgcggtgactcctgtcctgggagctgcccgagcctgtcggcacccgagggctgtgagtcggcctgccgtgaaggctgtgtctgcgatgctggcttcgtgctcagtggtgacacgtgtgtacctgtgggccagtgtggctgcctccacgatgaccgctactacccactgggccagaccttctaccctggccctgggtgtgattccctttgccgctgccgggagggcggtgaggtgtcctgtgagccctccagctgcggcccgcatgagacctgccggccatccggtggcagcttgggctgcgtggccgtgggctctaccacctgccaggcgtcgggagatccccactacaccaccttcgatggccgccgcttcgacttcatgggcacctgcgtgtatgtgctggctcagacctgcggcacccggcctggcctacatcggtttgccgtcctgcaggagaacgtggcctggggtaatgggcgagtcagtgtgaccagggtgatcacggtccaggtggcaaacttcaccctgcggctggagcagagacagtggaaggtcacggtgaacggtgtggacatgaagctgcccgtggtgctggccaacggccagatccgtgcctcccagcatggttcagatgttgtgattgagaccgacttcggcctgcgtgtggcctacgaccttgtgtactatgtgcgggtcaccgtccctggaaactactaccagctgatgtgtggcctgtgtgggaactacaacggcgaccccaaggatgacttccagaagcccaatggctcgcaggcaggcaacgccaatgagttcggcaactcctgggaggaggtggtgcccgactctccctgcctgccgccgcccacctgcccgccggggagcgagggctgtatccccagcgaggagtgtcctcccgagctggagaagaagtatcagaaggaggagttctgtgggctcctctccagccccacagggccactgtcctcctgccacaagctggtggatccccagggtcccttgaaagattgcatctttgatctctgcctgggtggtgggaacctgagcattctctgcagcaacatccatgcctacgtgagtgcttgccaggcggctggaggccacgtggagccctggaggaatgaaactttctgtcccatggaatgccctcagaacagtcactacgagctctgtgcggacacctgctccctgggctgctcggctctcagtgcccctctgcagtgcccagatgggtgtgctgagggctgccagtgtgactccggcttcctctacaacggccaagcctgcgtgcccatccagcaatgtggctgctaccacaatggtgtctactatgagccggagcagacagtcctcattgacaactgtcggcagcagtgcacgtgccatgtgggtaaagtcgtggtgtgccaggaacacagctgcaagccggggcaggtgtgccagccctccggaggcatcctgagctgcgtcaacaaagacccgtgccacggcgtgacatgccggccacaggagacatgcaaggagcagggtggccagggtgtgtgcctgcccaactatgaggccacgtgctggctgtggggcgacccacactaccactccttcgatggccggaagtttgacttccagggcacctgtaactatgtgctggcaacaactggctgcccgggggtcagcacccagggcctgacacccttcaccgtcaccaccaagaaccagaaccggggcaaccctgctgtatcctacgtgagagtcgtcaccgtggctgccctcggcaccaacatctccatccacaaggacgagatcggcaaagtccgggtgaacggtgtgctcacagccttgcctgtctccgtggccgacgggcggatttcagtggcccagggtgcatcgaaggcactgctggtggctgactttggactgcaagtcagctatgactggaactggcgggtagacgtgacgctccccagcagctatcatggcgcagtgtgcgggctctgcggtaacatggaccgcaaccccaacaatgaccaggtcttccctaatggcacactggctccctccatacccatctggggcggcagctggcgagccccaggctgggacccactgtgttgggacgaatgtcgggggtcctgcccaacgtgccctgaggaccggttggagcagtacgaggggcctggcttctgcggacccctggcatctggcacagggggccccttcaccacctgccatgctcatgtgccacctgagagcttcttcaagggctgtgttctggacgtctgcatgggtggtggggaccatgacattctttgcaaggctctggcttcctacgtggccgcctgccaggccgctggggttgtcatcgaagactggcgggcacaggttggctgtgagatcacctgcccagaaaacagccactatgaggtctgtggcccaccctgcccggccagctgtccgtcccctgcaccccttacgacgccagccgtatgtgagggcccctgtgtggagggctgccagtgcgacgcgggtttcgtgttaagtgctgaccgctgtgttcccctcaacaacggctgcggctgctgggccaatggcacctaccacgaggcgggcagtgagttttgggctgatggcacctgctcccagtggtgtcgctgcgggcctgggggtggctcgctggtctgcacacctgccagctgtgggctgggtgaagtgtgtggcctcctgccatccggccagcacagctgccagcccgtcagcacagctgagtgccaggcgtggggtgacccccattacgtcactctggatgggcaccgattcgatttccaaggcacctgcgagtacctgctgagtgcaccctgccacggaccacccttgggggctgagaacttcactgtcactgtagccaatgagcaccggggcagccaggctgtcagctacacccgcagtgtcaccctgcaaatctacaaccacagcctgacactgagtgcccgctggccccggaagctacaggtcgacggcgtgttcgtggctctgcctttccagctggactcgctcctgcacgcacacctgagcggcgccgacgtggtggtgaccacaacctcagggctctcgctggctttcgatggggacagcttcgtgcgcctgcgcgtgccggcggcgtacgcggcctctctctgtggcttatgcgggaactacaaccaggaccccgcagacgacctgaaggctgtgggcgggaagcccgctggatggcaggtgggcggggcccagggctgcggggaatgtgtgtccaagccatgcccgtcgccgtgcaccccagagcagcaggagtccttcggcggcccggacgcctgcggcgtgatctccgccaccgacggcccgctggcaccctgccacggccttgtgccgcccgcgcagtacttccagggctgcttgctggacgcctgccaagttcagggccatcctggaggcctctgtcctgcagtggctacctacgtggcagcctgtcaggccgctggggcccagctcggcgagtggaggcggccggacttctgtcccttgcagtgccctgcccacagccactatgagctctgcggtgactcctgccctgtgagctgcccgagcctctcagcacccgagggctgtgagtcggcctgccgtgaaggctgtgtctgcgatgctggcttcgtactcagtggtgacacctgcgtacccgtgggccagtgtggctgcctccatgatggccgctactacccactgggcgaggtcttctacccgggccctgagtgtgagcgacgctgtgagtgtgggccaggtggccatgtcacctgccaggagggcgcagcctgtgggccccatgaggagtgccggttagaggatggtgtccaggcctgtcatgccacaggctgtggccgctgcctggccaacgggggcatccactacatcacccttgatggccgtgtctacgacctgcatggctcctgctcctatgtcttggcccaagtctgccacccaaagcctggggacgaggacttttccatcgtgcttgagaagaatgcagctggacatctccaacgcctcctggttactgtggctggccaggttgtgagcctagctcaggggcagcaggtcaccgtggacggcgaggctgtggccctgcctgtggctgtgggccgcgtgcgggtgaccgccgagggccgaaacatggttctgcagacgaccaaggggctgcggcttctctttgatggcgatgcccacctcctcatgtccatccccagccccttccgtggacggctctgtggcctctgtgggaacttcaatggcaactggagtgacgactttgtcctgcccaatggctcagcagcgtccagtgtggagaccttcggggctgcatggcgggtgcccggctcctccaagggctgtggcgagggctgcgggccccaaggctgcccagtgtgcttggcagaggagactgcaccctatgagagcaacgaggcctgcgggcagctccggaacccccagggccccttcgcgacctgccaggcggtgctgagtccctctgagtacttccgccaatgcgtatacgacctgtgcgcgcaaaagggtgacaaagccttcctgtgccgcagcctggcagcctacacggcggcctgtcaggcagctggcgtggccgtgaagccctggaggacagacagcttctgcccgctccattgccccgcccacagccactactccatctgcactcgcacctgccagggatcctgtgcggctctctccggcctcacgggctgcaccacccgctgttttgagggctgtgagtgcgacgaccgcttcctgctttcccagggtgtctgcatccctgtccaagattgtggctgcacccataatggccgatacttgccggtaaactcctccctgctgacctcagactgcagcgagcgctgttcctgttcctcaagctctggcctgacatgccaggccgctggctgcccaccaggccgtgtatgtgaggtcaaggctgaagcccggaactgctgggccacccgtggtctctgtgtcctgtctgtgggtgccaacctcaccacctttgatggggcccgtggtgccaccacctctcctggtgtctatgagctctcttcccgctgcccaggactacagaataccatcccctggtaccgtgtagttgccgaagtccagatctgccatggcaaaacggaggctgtgggccaggtccacatcttcttccaggatgggatggtgacgttgactccaaacaagggtgtgtgggtgaatggtctccgagtggatctcccagctgagaagttagcatctgtgtccgtgagtcgtacacctgatggctccctgctagtccgccagaaggcaggggtccaggtgtggcttggagccaatgggaaggtggctgtgattgtcagcaatgaccatgctgggaaactgtgtggggcctgtggaaactttgacggggaccagaccaatgattggcatgactcccaggagaagccagcgatggagaaatggagagcgcaggacttctccccatgttatggctgatcagtcatccaccaggaacgaagatttcctgaagaagacctggtccctctggaggttgcggtggctgaaggatgcatcatgtgctcctaccctgctctaccgcttttctgggtcacagaggccaaatgtgagagcattgaataaatatcttaagct

SEQ ID NO: 1113 - DNA, 3143 bp, Homo sapiens
gaattcatgtcttacggtcaagggggaggctgccagagggtttgtcactgctgttgctcctccgcctcagcgagtccagcccgggcctagtcggtcgcctgcctttctcatggccgttaccctcaggccgccacagccgccgaccgggagaggcgcgcgccatggcctctggagccgattcaaaaggtgatgatttatcaacagccattctcaaacagaagaaccgacccaatcggttaattgttgatgaagccatcaatgaagataacagcgtggtgtccttgtcccagcccaagatggatgaactgcagttgttccgaggtgacacggtgttgctaaaaggaaagaaaagacgggaagctgtatgcattgttctttctgatgacacgtgttctgatgagaagattcgaatgaatagagttgttcggaataacctccgagttcgcctaggagatgtcatcagcatccagccatgccctgatgtaaagtatggcaaacgtatccacgttctacccatcgatgacacagtggaaggcatcactggcaatctctttgaggtataccttaagccgtacttcctggaagcttatcggcccatccgtaaaggagatatttttcttgtccggggtgggatgcgtgctgtggagttcaaagttgtagagacagatcccagcccttactgtattgttgctccagacacagtgatccactgtgagggggagccaatcaaacgagaggatgaggaggaatccttgaatgaagtaggctatgatgacgtcggtggttgcaggaagcagctagctcagataaaggagatggtggagctgccactgagacatcctgcgctcttcaaggcgattggtgtaaagcctcctcggggaatcttgttgtatgggcctcctgggacagggaagaccctgattgctcgagctgtggcaaatgaaactggagccttcttctttctgatcaatggtcctgaaatcatgagcaaattggctggtgagtctgagagcaaccttcgtaaagcctttgaggaagctgaaaagaatgctcctgctatcatcttcatcgatgagcttgatgccattgcacccaaaagagagaaaactcatggggaagtggagcgtcgcatcgtgtctcagttgttgaccctcatggatggcctaaagcagagagcacatgtgatagttatggcagcaaccaatagacccaacagcattgacccagccctacggcgatttggtcgctttgacagagaggtagatattggaatacctgatgctacaggacgtttggagattcttcagatccataccaagaacatgaaactggcagatgatgtggacttggaacaggtagccaatgagactcatggtcatgttggtgctgatttggcagccctatgttcagaggctgctctgcaggccatccggaaaaaaatggacctcattgacctagaagatgagaccattgatgctgaggtcatgaattccctggcagttactatggatgacttccggtgggctttgagtcaaagcaacccatcagcacttcgggaaactgtggtagaggtgccacaagtaacctgggaagatattggaggcctggaggatgtcaaacgtgagcttcaggagttggttcagtaccccgtggaacatccagacaaattcctcaaatttggcatgactccctccaaaggtgttcttttctatggacctcctggctgtgggaaaaccttactggctaaagccattgctaatgaatgccaggccaacttcatctccatcaagggtcctgagctgcttaccatgtggtttggggaatctgaggccaatgtccgggaaatttttgacaaggcacggcaagctgccccctgtgtactcttctttgatgagttagattcaattgccaaggctcgtggtggtaatattggagatggtggtggagctgctgaccgagtcatcaatcagatcttgacagaaatggatggcatgtctacaaaaaagaatgtgtttatcattggagctaccaacaggcctgacatcattgatcctgctatcctaagacctggccgtctagatcagctcatttatatcccacttcctgatgagaagtcccgtgttgccatcctaaaagccaatctgcgaaagtccccagttgccaaggatgtggatttggagttcctggctaagatgactaatggcttttctggagctgatttgacagaaatttgccaacgggcttgtaaactggccattcgtgaatctattgagagtgagattaggcgagaacgagagaggcagacaaatccatcggctatggaggtagaagaggatgatccagtgcctgagatccgcagagatcactttgaggaagccatgcgttttgcccgacgttctgtgagcgataatgacattcggaagtatgaaatgttcgcccagacactgcagcagagtcgaggttttggcagcttcagattcccttcagggaaccagggtggagctggtcccagccagggcagtggaggtggcacaggtggcagtgtgtacacagaagacaatgacgatgacctgtatggctaagtgatgtgccagcatgcagcgagctggcctggctggaccttgttccctggggagggggcgcttcgcaagagggcccaggggtgtgcccatggcctgctccattcctcagtctgaacagttcagcccagtcagactctggacaggggtttcctgttgcaaaaaaaaaaattacaaaagcgataaaataaaagtgattttcatttgggaggtgaagagtgaattaccagcaaggaattgggtcttgggcccacacggtttctgtcgtagtttggggtggtgcaggtaacctgtgtggtgtgaaccaagcattgccaccaccatcaccacagtaaagcatctatactcaatgctgtccaagtcctctcttaccctagccaacctgggtaggtggatgaggggcctcagtttgctgggtgtttatatagaaagtaggttgatttttattttacatgcttttgagttacgttggaagactaatcataagcagtttctaaaccaaaaaaaagaaaaaaaaaaaaaaagacatgttgtaaaaggacaataaatgttgggtcaaaatgg

SEQ ID NO: 1114 - DNA, 3195 bp, Homo sapiens
ctgccactgccacctcgcggatcaggagccagcgttgttcgcccgacgcctcgctgccggtgggaggaagcgagagggaagccgcttgcgggtttgtcgccgctgctcgcccaccgcctggaagagccgagccccggcccagtcggtcgcttgccaccgctcgtagccgttacccgcgggccgccacagccgccggccgggagaggcgcgcgccatggcttctggagccgattcaaaaggtgatgacctatcaacagccattctcaaacagaagaaccgtcccaatcggttaattgttgatgaagccatcaatgaggacaacagtgtggtgtccttgtcccagcccaagatggatgaattgcagttgttccgaggtgacacagtgttgctgaaaggaaagaagagacgagaagctgtttgcatcgtcctttctgatgatacttgttctgatgagaagattcggatgaatagagttgttcggaataaccttcgtgtacgcctaggggatgtcatcagcatccagccatgccctgatgtgaagtacggcaaacgtatccatgtgctgcccattgatgacacagtggaaggcattactggtaatctcttcgaggtataccttaagccgtacttcctggaagcgtatcgacccatccggaaaggagacatttttcttgtccgtggtgggatgcgtgctgtggagttcaaagtggtggaaacagatcctagcccttattgcattgttgctccagacacagtgatccactgcgaaggggagcctatcaaacgagaggatgaggaagagtccttgaatgaagtagggtatgatgacattggtggctgcaggaagcagctagctcagataaaggagatggtggaactgcccctgagacatcctgccctctttaaggcaattggtgtgaagcctcctagaggaatcctgctttacggacctcctggaacaggaaagaccctgattgctcgagctgtagcaaatgagactggagccttcttcttcttgatcaatggtcctgagatcatgagcaaattggctggtgagtctgagagcaaccttcgtaaagcctttgaggaggctgagaagaatgctcctgccatcatcttcattgatgagctagatgccatcgctcccaaaagagagaaaactcatggcgaggtggagcggcgcattgtatcacagttgttgaccctcatggatggcctaaagcagagggcacatgtgattgttatggcagcaaccaacagacccaacagcattgacccagctctacggcgatttggtcgctttgacagggaggtagatattggaattcctgatgctacaggacgcttagagattcttcagatccataccaagaacatgaagctggcagatgatgtggacctggaacaggtagccaatgagactcacgggcatgtgggtgctgacttagcagccctgtgctcagaggctgctctgcaagccatccgcaagaagatggatctcattgacctagaggatgagaccattgatgccgaggtcatgaactctctagcagttactatggatgacttccggtgggccttgagccagagtaacccatcagcactgcgggaaaccgtggtagaggtgccacaggtaacctgggaagacatcgggggcctagaggatgtcaaacgtgagctacaggagctggtccagtatcctgtggagcacccagacaaattcctgaagtttggcatgacaccttccaagggagttctgttctatggacctcctggctgtgggaaaactttgttggccaaagccattgctaatgaatgccaggccaacttcatctccatcaagggtcctgagctgctcaccatgtggtttggggagtctgaggccaatgtcagagaaatctttgacaaggcccgccaagctgccccctgtgtgctattctttgatgagctggattcgattgccaaggctcgtggaggtaacattggagatggtggtggggctgctgaccgagtcatcaaccagatcctgacagaaatggatggcatgtccacaaaaaaaaatgtgttcatcattggcgctaccaaccggcctgacatcattgatcctgccatcctcagacctggccgtcttgatcagctcatctacatcccacttcctgatgagaagtcccgtgttgccatcctcaaggctaacctgcgcaagtccccagttgccaaggatgtggacttggagttcctggctaaaatgactaatggcttctctggagctgacctgacagagatttgccagcgtgcttgcaagctggccatccgtgaatccatcgagagtgagattaggcgagaacgagagaggcagacaaacccatcagccatggaggtagaagaggatgatccagtgcctgagatccgtcgagatcactttgaagaagccatgcgctttgcgcgccgttctgtcagtgacaatgacattcggaagtatgagatgtttgcccagacccttcagcagagtcggggctttggcagcttcagattcccttcagggaaccagggtggagctggccccagtcagggcagtggaggcggcacaggtggcagtgtatacacagaagacaatgatgatgacctgtatggctaagtggtggtggccagcgtgcagtgagctggcctgcctggaccttgttccctgggggtgggggcgcttgcccaggagagggaccaggggtgcgcccacagcctgctccattctccagtctgaacagttcagctacagtctgactctggacagggggtttctgttgcaaaaatacaaaacaaaagcgataaaataaaagcgattttcatttggtaggcggagagtgaattaccaacagggaattgggccttgggcctatgccatttctgttgtagtttggggcagtgcaggggacctgtgtggggtgtgaaccaaggcactactgccacctgccacagtaaagcatctgcacttgactcaatgctgcccgagccctcccttccccctatccaacctgggtaggtgggtaggggccacagttgctggatgtttatatagagagtaggttgatttattttacatgcttttgagttaatgttggaaaactaatcacaagcagtttctaaaccaaaaaatgacatgttgtaaaaggacaataaacgttgggtcaaaatggagcctga

SEQ ID NO: 1115 - protein, 400 aa, Homo sapiens
MTSYSYRQSSATSSFGGLGGGSVRFGPGVAFRAPSIHGGSGGRGVSVSSARFVSSSSSGGYGGGYGGVLTASDGLLAGNEKLTMQNLNDRLASYLDKVRALEAANGELEVKIRDWYQKQGPGPSRDYSHYYTTIQDLRDKILGATIENSRIVLQIDNARLAADDFRTKFETEQALRMSVEADINGLRRVLDELTLARTDLEMQIEGLKEELAYLKKNHEEEISTLRGQVGGQVSVEVDSAPGTDLAKILSDMRSQYEVMAEQNRKDAEAWFTSRTEELNREVAGHTEQLQMSRSEVTDLRRTLQGLEIELQSQLSMKAALEDTLAETEARFGAQLAHIQALISGIEAQLADVRADSERQNQEYQRLMDIKSRLEQEIATYRSLLEGQEDHYNNLSASKVL

SEQ ID NO: 1116 - protein, 5405 aa, Homo sapiens
MGALWSWWILWAGATLLWGLTQEASVDLKNTGREEFLTAFLQNYQLAYSKAYPRLLISSLSESPASVSILSQADNTSKKVTVRPGESVMVNISAKAEMIGSKIFQHAVVIHSDYAISVQALNAKPDTAELTLLRPIQALGTEYFVLTPPGTSARNVKEFAVVAGAAGASVSVTLKGSVTFNGKFYPAGDVLRVTLQPYNVAQLQSSVDLSGSKVTASSPVAVLSGHSCAQKHTTCNHVVEQLLPTSAWGTHYVVPTLASQSRYDLAFVVASQATKLTYNHGGITGSRGLQAGDVVEFEVRPSWPLYLSANVGIQVLLFGTGAIRNEVTYDPYLVLIPDVAAYCPAYVVKSVPGCEGVALVVAQTKAISGLTIDGHAVGAKLTWEAVPGSEFSYAEVELGTADMIHTAEATTNLGLLTFGLAKAIGYATAADCGRTVLSPVEPSCEGMQCAAGQRCQVVGGKAGCVAESTAVCRAQGDPHYTTFDGRRYDMMGTCSYTMVELCSEDDTLPAFSVEAKNEHRGSRRVSYVGLVTVRAYSHSVSLTRGEVGFVLVDNQRSRLPVSLSEGRLRVYQSGPRAVVELVFGLVVTYDWDCQLALSLPARFQDQVCGLCGNYNGDPADDFLTPDGALAPDAVEFASSWKLDDGDYLCEDGCQNNCPACTPGQAQHYEGDRLCGMLTKLDGPFAVCHDTLDPRPFLEQCVYDLCVVGGERLSLCRGLSAYAQACLELGISVGDWRSPANCPLSCPANSRYELCGPACPTSCNGAAAPSNCSGRPCVEGCVCLPGFVASGGACVPASSCGCTFQGLQLAPGQEVWADELCQRRCTCNGATHQVTCRDKQSCPAGERCSVQNGLLGCYPDRFGTCQGSGDPHYVSFDGRRFDFMGTCTYLLVGSCGQNAALPAFRVLVENEHRGSQTVSYTRAVRVEARGVKVAVRREYPGQVLVDDVLQYLPFQAADGQVQVFRQGRDAVVRTDFGLTVTYDWNARVTAKVPSSYAEALCGLCGNFNGDPADDLALRGGGQAANALAFGNSWQEETRPGCGATEPGDCPKLDSLVAQQLQSKNECGILADPKGPFRECHSKLDPQGAVRDCVYDRCLLPGQSGPLCDALATYAAACQAAGATVHPWRSEELCPLSCPPHSHYEACSYGCPLSCGDLPVPGGCGSECHEGCVCDEGFALSGESCLPLASCGCVHQGTYHPPGQTFYPGPGCDSLCHCQEGGLVSCESSSCGPHEACQPSGGSLGCVAVGSSTCQASGDPHYTTFDGRRFDFMGTCVYVLAQTCGTRPGLHRFAVLQENVAWGNGRVSVTRVITVQVANFTLRLEQRQWKVTVNGVDMKLPVVLANGQIRASQHGSDVVIETDFGLRVAYDLVYYVRVTVPGNYYQQMCGLCGNYNGDPKDDFQKPNGSQAGNANEFGNSWEEVVPDSPCLPPTPCPPGSEDCIPSHKCPPELEKKYQKEEFCGLLSSPTGPLSSCHKLVDPQGPLKDCIFDLCLGGGNLSILCSNIHAYVSACQAAGGHVEPWRTETFCPMECPPNSHYELCADTCSLGCSALSAPPQCQDGCAEGCQCDSGFLYNGQACVPIQQCGCYHNGVYYEPEQTVLIDNCRQQCTCHAGKGMVCQEHSCKPGQVCQPSGGILSCVTKDPCHGVTCRPQETCKEQGGQGVCLPNYEATCWLWGDPHYHSFDGRKFDFQGTCNYVLATTGCPGVSTQGLTPFTVTTKNQNRGNPAVSYVRVVTVAALGTNISIHKDEIGKVRVNGVLTALPVSVADGRISVTQGASKALLVADFGLQVSYDWNWRVDVTLPSSYHGAVCGLCGNMDRNPNNDQVFPNGTLAPSIPIWGGSWRAPGWDPLCWDECRGSCPTCPEDRLEQYEGPGFCGPLAPGTGGPFTTCHAHVPPESFFKGCVLDVCMGGGDRDILCKALASYVAACQAAGVVIEDWRAQVGCEITCPENSHYEVCGPPCPASCPSPAPLTTPAVCEGPCVEGCQCDAGFVLSADRCVPLNNGCGCWANGTYHEAGSEFWADGTCSQWCRCGPGGGSLVCTPASCGLGEVCGLLPSGQHGCQPVSTAECQAWGDPHYVTLDGHRFNFQGTCEYLLSAPCHGPPLGAENFTVTVANEHRGSQAVSYTRSVTLQIYNHSLTLSARWPRKLQVDGVFVTLPFQLDSLLHAHLSGADVVVTTTSGLSLAFDGDSFVRLRVPAAYAGSLCGLCGNYNQDPADDLKAVGGKPAGWQVGGAQGCGECVSKPCPSPCTPEQQESFGGPDACGVISATDGPLAPCHGLVPPAQYFQGCLLDACQVQGHPGGLCPAVATYVAACQAAGAQLREWRRPDFCPFQCPAHSHYELCGDSCPGSCPSLSAPEGCESACREGCVCDAGFVLSGDTCVPVGQCGCLHDDRYYPLGQTFYPGPGCDSLCRCREGGEVSCEPSSCGPHETCRPSGGSLGCVAVGSTTCQASGDPHYTTFDGRRFDFMGTCVYVLAQTCGTRPGLHRFAVLQENVAWGNGRVSVTRVITVQVANFTLRLEQRQWKVTVNGVDMKLPVVLANGQIRASQHGSDVVIETDFGLRVAYDLVYYVRVTVPGNYYQLMCGLCGNYNGDPKDDFQKPNGSQAGNANEFGNSWEEVVPDSPCLPPPTCPPGSEGCIPSEECPPELEKKYQKEEFCGLLSSPTGPLSSCHKLVDPQGPLKDCIFDLCLGGGNLSILCSNIHAYVSACQAAGGHVEPWRNETFCPMECPQNSHYELCADTCSLGCSALSAPLQCPDGCAEGCQCDSGFLYNGQACVPIQQCGCYHNGAYYEPEQTVLIDNCRQQCTCHAGKVVVCQEHSCKPGQVCQPSGGILSCVTKDPCHGVTCRPQETCKEQGGQGVCLPNYEATCWLWGDPHYHSFDGRKFDFQGTCNYVLATTGCPGVSTQGLTPFTVTTKNQNRGNPAVSYVRVVTVAALGTNISIHKDEIGKVRVNGVLTALPVSVADGRISVAQGASKALLVADFGLQVSYDWNWRVDVTLPSSYHGAVCGLCGNMDRNPNNDQVFPNGTLAPSIPIWGGSWRAPGWDPLCWDECRGSCPTCPEDRLEQYEGPGFCGPLAPGTGGPFTTCHAHVPPESFFKGCVLDVCMGGGDHDILCKALASYVAACQAAGVVIEDWRAQVGCEITCPENSHYEVCGPPCPASCPSPAPLTTPAVCEGPCVEGCQCDAGFVLSADRCVPLNNGCGCWANGTYHEAGSEFWADGTCSQWCRCGPGGGSLVCTPASCGLGEVCGLLPSGQHGCQPVSTAECQAWGDPHYVTLDGHRFDFQGTCEYLLSAPCHGPPLGAENFTVTVANEHRGSQAVSYTRSVTLQIYNHSLTLSARWPRKLQVDGVFVTLPFQLDSLLHAHLSGADVVVTTTSGLSLAFDGDSFVRLRVPAAYAGSLCGLCGNYNQDPADDLKAVGGKPAGWQVGGAQGCGECVSKPCPSPCTPEQQESFGGPDACGVISATDGPLAPCHGLVPPAQYFQGCLLDACQVQGHPGGLCPAVATYVAACQAAGAQLREWRRPDFCPFQCPAHSHYELCGDSCPGSCPSLSAPEGCESACREGCVCDAGFVLSGDTCVPVGQCGCLHDDRYYPLGQTFYPGPGCDSLCRCREGGEVSCEPSSCGPHETCRPSGGSLGCVAVGSTTCQASGDPHYTTFDGRRFDFMGTCVYVLAQTCGTRPGLHRFAVLQENVAWGNGRVSVTRVITVQVANFTLRLEQRQWKVTVNGVDMKLPVVLANGQIRASQHGSDVVIETDFGLRVAYDLVYYVRVTVPGNYYQLMCGLCGNYNGDPKDDFQKPNGSQAGNANEFGNSWEEVVPDSPCLPPPTCPPGSEGCIPSEECPPELEKKYQKEEFCGLLSSPTGPLSSCHKLVDPQGPLKDCIFDLCLGGGNLSILCSNIHAYVSACQAAGGHVEPWRNETFCPMECPQNSHYELCADTCSLGCSALSAPLQCPDGCAEGCQCDSGFLYNGQACVPIQQCGCYHNGVYYEPEQTVLIDNCRQQCTCHVGKVVVCQEHSCKPGQVCQPSGGILSCVNKDPCHGVTCRPQETCKEQGGQGVCLPNYEATCWLWGDPHYHSFDGRKFDFQGTCNYVLATTGCPGVSTQGLTPFTVTTKNQNRGNPAVSYVRVVTVAALGTNISIHKDEIGKVRVNGVLTALPVSVADGRISVAQGASKALLVADFGLQVSYDWNWRVDVTLPSSYHGAVCGLCGNMDRNPNNDQVFPNGTLAPSIPIWGGSWRAPGWDPLCWDECRGSCPTCPEDRLEQYEGPGFCGPLASGTGGPFTTCHAHVPPESFFKGCVLDVCMGGGDHDILCKALASYVAACQAAGVVIEDWRAQVGCEITCPENSHYEVCGPPCPASCPSPAPLTTPAVCEGPCVEGCQCDAGFVLSADRCVPLNNGCGCWANGTYHEAGSEFWADGTCSQWCRCGPGGGSLVCTPASCGLGEVCGLLPSGQHSCQPVSTAECQAWGDPHYVTLDGHRFDFQGTCEYLLSAPCHGPPLGAENFTVTVANEHRGSQAVSYTRSVTLQIYNHSLTLSARWPRKLQVDGVFVALPFQLDSLLHAHLSGADVVVTTTSGLSLAFDGDSFVRLRVPAAYAASLCGLCGNYNQDPADDLKAVGGKPAGWQVGGAQGCGECVSKPCPSPCTPEQQESFGGPDACGVISATDGPLAPCHGLVPPAQYFQGCLLDACQVQGHPGGLCPAVATYVAACQAAGAQLGEWRRPDFCPLQCPAHSHYELCGDSCPVSCPSLSAPEGCESACREGCVCDAGFVLSGDTCVPVGQCGCLHDGRYYPLGEVFYPGPECERRCECGPGGHVTCQEGAACGPHEECRLEDGVQACHATGCGRCLANGGIHYITLDGRVYDLHGSCSYVLAQVCHPKPGDEDFSIVLEKNAAGHLQRLLVTVAGQVVSLAQGQQVTVDGEAVALPVAVGRVRVTAEGRNMVLQTTKGLRLLFDGDAHLLMSIPSPFRGRLCGLCGNFNGNWSDDFVLPNGSAASSVETFGAAWRVPGSSKGCGEGCGPQGCPVCLAEETAPYESNEACGQLRNPQGPFATCQAVLSPSEYFRQCVYDLCAQKGDKAFLCRSLAAYTAACQAAGVAVKPWRTDSFCPLHCPAHSHYSICTRTCQGSCAALSGLTGCTTRCFEGCECDDRFLLSQGVCIPVQDCGCTHNGRYLPVNSSLLTSDCSERCSCSSSSGLTCQAAGCPPGRVCEVKAEARNCWATRGLCVLSVGANLTTFDGARGATTSPGVYELSSRCPGLQNTIPWYRVVAEVQICHGKTEAVGQVHIFFQDGMVTLTPNKGVWVNGLRVDLPAEKLASVSVSRTPDGSLLVRQKAGVQVWLGANGKVAVIVSNDHAGKLCGACGNFDGDQTNDWHDSQEKPAMEKWRAQDFSPCYG

SEQ ID NO: 1117 - protein, 806 aa, Homo sapiens
MASGADSKGDDLSTAILKQKNRPNRLIVDEAINEDNSVVSLSQPKMDELQLFRGDTVLLKGKKRREAVCIVLSDDTCSDEKIRMNRVVRNNLRVRLGDVISIQPCPDVKYGKRIHVLPIDDTVEGITGNLFEVYLKPYFLEAYRPIRKGDIFLVRGGMRAVEFKVVETDPSPYCIVAPDTVIHCEGEPIKREDEEESLNEVGYDDVGGCRKQLAQIKEMVELPLRHPALFKAIGVKPPRGILLYGPPGTGKTLIARAVANETGAFFFLINGPEIMSKLAGESESNLRKAFEEAEKNAPAIIFIDELDAIAPKREKTHGEVERRIVSQLLTLMDGLKQRAHVIVMAATNRPNSIDPALRRFGRFDREVDIGIPDATGRLEILQIHTKNMKLADDVDLEQVANETHGHVGADLAALCSEAALQAIRKKMDLIDLEDETIDAEVMNSLAVTMDDFRWALSQSNPSALRETVVEVPQVTWEDIGGLEDVKRELQELVQYPVEHPDKFLKFGMTPSKGVLFYGPPGCGKTLLAKAIANECQANFISIKGPELLTMWFGESEANVREIFDKARQAAPCVLFFDELDSIAKARGGNIGDGGGAADRVINQILTEMDGMSTKKNVFIIGATNRPDIIDPAILRPGRLDQLIYIPLPDEKSRVAILKANLRKSPVAKDVDLEFLAKMTNGFSGADLTEICQRACKLAIRESIESEIRRERERQTNPSAMEVEEDDPVPEIRRDHFEEAMRFARRSVSDNDIRKYEMFAQTLQQSRGFGSFRFPSGNQGGAGPSQGSGGGTGGSVYTEDNDDDLYG

SEQ ID NO: 1118 - protein, 806 aa, Homo sapiens
MASGADSKGDDLSTAILKQKNRPNRLIVDEAINEDNSVVSLSQPKMDELQLFRGDTVLLKGKKRREAVCIVLSDDTCSDEKIRMNRVVRNNLRVRLGDVISIQPCPDVKYGKRIHVLPIDDTVEGITGNLFEVYLKPYFLEAYRPIRKGDIFLVRGGMRAVEFKVVETDPSPYCIVAPDTVIHCEGEPIKREDEEESLNEVGYDDIGGCRKQLAQIKEMVELPLRHPALFKAIGVKPPRGILLYGPPGTGKTLIARAVANETGAFFFLINGPEIMSKLAGESESNLRKAFEEAEKNAPAIIFIDELDAIAPKREKTHGEVERRIVSQLLTLMDGLKQRAHVIVMAATNRPNSIDPALRRFGRFDREVDIGIPDATGRLEILQIHTKNMKLADDVDLEQVANETHGHVGADLAALCSEAALQAIRKKMDLIDLEDETIDAEVMNSLAVTMDDFRWALSQSNPSALRETVVEVPQVTWEDIGGLEDVKRELQELVQYPVEHPDKFLKFGMTPSKGVLFYGPPGCGKTLLAKAIANECQANFISIKGPELLTMWFGESEANVREIFDKARQAAPCVLFFDELDSIAKARGGNIGDGGGAADRVINQILTEMDGMSTKKNVFIIGATNRPDIIDPAILRPGRLDQLIYIPLPDEKSRVAILKANLRKSPVAKDVDLEFLAKMTNGFSGADLTEICQRACKLAIRESIESEIRRERERQTNPSAMEVEEDDPVPEIRRDHFEEAMRFARRSVSDNDIRKYEMFAQTLQQSRGFGSFRFPSGNQGGAGPSQGSGGGTGGSVYTEDNDDDLYG

SEQ ID NO: 1119 - DNA, 1341 bp, Homo sapiens
atgtcctgcggtaacgccaagatcaactctcccgcgccgtccttcgaggaggtggcgctcatgcccaacggcagcttcaagaagatcagcctctcctcctacaagggcaagtgggtcgtgctcttcttctacccgctcgacttcaccttcgtgtgcccgacagaggtcatcgcgttctccgacagcgtgagtcgcttcaacgagctcaactgcgaggtcctcgcgtgctcgatagacagcgagtacgcgcacctgcagtggacgctgcaggaccgcaagaagggcggcctcgggaccatggcgatcccaatgctagccgacaagaccaagagcatcgctcgttcctacggcgtgctggaggagagccagggcgtggcctaccgcggtctcttcatcatcgacccccatggcatgctgcgtcagatcaccgtcaatgacatgccggtgggccgcagcgtggaggaggttctacgcctgctggaggcttttcagttcgtggagaagcacggcgaggtgtgccccgcgaactggaagaagggcgcccccacgatgaagccggaaccgaatgcgtctgtcgagggatacttcagcaagcagtctagagaattcatggcaggtgtgagtgcctgtataaaatattctatgtttaccttcaacttcttgttctggctatgtggtatcttgatcctagcattagcaatatgggtacgagtaagcaatgactctcaagcaatttttggttctgaagatgtaggctctagctcctacgttgctgtggacatattgattgctgtaggtgccatcatcatgattctgggcttcctgggatgctgcggtgctataaaagaaagtcgctgcatgcttctgttgtttttcataggcttgcttctgatcctgctcctgcaggtggcgacaggtatcctaggagctgttttcaaatctaagtctgatcgcattgtgaatgaaactctctatgaaaacacaaagcttttgagcgccacaggggaaagtgaaaaacaattccaggaagccataattgtgtttcaagaagagtttaaatgctgcggtttggtcaatggagctgctgattggggaaataattttcaacactatcctgaattatgtgcctgtctagataagcagagaccatgccaaagctataatggaaaacaagtttacaaagagacctgtatttctttcataaaagacttcttggcaaaaaatttgattatagttattggaatatcatttggactggcagttattgagatactgggtttggtgttttctatggtcctgtattgccagatcgggaacaaacaccatcaccatcaccattga

SEQ ID NO: 1120 - DNA, 732 bp, Homo sapiens
atggcaggtgtgagtgcctgtataaaatattctatgtttaccttcaacttcttgttctggctatgtggtatcttgatcctagcattagcaatatgggtacgagtaagcaatgactctcaagcaatttttggttctgaagatgtaggctctagctcctacgttgctgtggacatattgattgctgtaggtgccatcatcatgattctgggcttcctgggatgctgcggtgctataaaagaaagtcgctgcatgcttctgttgtttttcataggcttgcttctgatcctgctcctgcaggtggcgacaggtatcctaggagctgttttcaaatctaagtctgatcgcattgtgaatgaaactctctatgaaaacacaaagcttttgagcgccacaggggaaagtgaaaaacaattccaggaagccataattgtgtttcaagaagagtttaaatgctgcggtttggtcaatggagctgctgattggggaaataattttcaacactatcctgaattatgtgcctgtctagataagcagagaccatgccaaagctataatggaaaacaagtttacaaagagacctgtatttctttcataaaagacttcttggcaaaaaatttgattatagttattggaatatcatttggactggcagttattgagatactgggtttggtgttttctatggtcctgtattgccagatcgggaacaaacaccatcaccatcaccattga

SEQ ID NO: 1121 - protein, 446 aa, Homo sapiens
MSCGNAKINSPAPSFEEVALMPNGSFKKISLSSYKGKWVVLFFYPLDFTFVCPTEVIAFSDSVSRFNELNCEVLACSIDSEYAHLQWTLQDRKKGGLGTMAIPMLADKTKSIARSYGVLEESQGVAYRGLFIIDPHGMLRQITVNDMPVGRSVEEVLRLLEAFQFVEKHGEVCPANWKKGAPTMKPEPNASVEGYFSKQSREFMAGVSACIKYSMFTFNFLFWLCGILILALAIWVRVSNDSQAIFGSEDVGSSSYVAVDILIAVGAIIMILGFLGCCGAIKESRCMLLLFFIGLLLILLLQVATGILGAVFKSKSDRIVNETLYENTKLLSATGESEKQFQEAIIVFQEEFKCCGLVNGAADWGNNFQHYPELCACLDKQRPCQSYNGKQVYKETCISFIKDFLAKNLIIVIGISFGLAVIEILGLVFSMVLYCQIGNKHHHHHH

SEQ ID NO: 1122 - protein, 243 aa, Homo sapiens
MAGVSACIKYSMFTFNFLFWLCGILILALAIWVRVSNDSQAIFGSEDVGSSSYVAVDILIAVGAIIMILGFLGCCGAIKESRCMLLLFFIGLLLILLLQVATGILGAVFKSKSDRIVNETLYENTKLLSATGESEKQFQEAIIVFQEEFKCCGLVNGAADWGNNFQHYPELCACLDKQRPCQSYNGKQVYKETCISFIKDFLAKNLIIVIGISFGLAVIEILGLVFSMVLYCQIGNKHHHHHH

SEQ ID NO: 1123 - DNA, 35 bp, Artificial Sequence
  PCR primer
ggagctagcgccgccatggcaggtgtgagtgcctg

SEQ ID NO: 1124 - DNA, 54 bp, Artificial Sequence
  PCR primer
gccggatcctcaatggtgatggtgatggtgtttgttcccgatctggcaatacag
